(19) United States
(12) Patent Application Publication
(10) Pub. No.: US 2007/0218071 A1
(43) Pub. Date: Sep. 20, 2007

(54) Novel therapeutic targets in cancer

(76) Inventors: David W. Morris, Davis, CA (US); Marc S. Malandro, Davis, CA (US)

Correspondence Address: Lisa E. Alexander;Sagres Discovery, Inc., c/o Chiron Corporation, P.O. Box 8097, Emeryville, CA, 94662-8097, US

(21) Appl. No.: 10/663,431

(22) Filed: Sep. 15, 2003

(51) Int. Cl. A61K 38/17; A61K 39/395; C07K 16/32; C12N 15/00; C12N 5/00; C12P 21/08; C12Q 1/68; G01N 33/574

(52) U.S. Cl. 424/180.1; 435/325; 435/346; 435/6; 435/69.1; 435/7.23; 530/350; 536/23.5

(57) ABSTRACT

The present invention relates to novel sequences for use in detection, diagnosis and treatment of cancers, especially lymphomas. The invention provides cancer-associated (CA) polynucleotide sequences whose expression is associated with cancer. The present invention provides CA polypeptides associated with cancer that are present on the cell surface and present novel therapeutic targets against cancer. The present invention further provides diagnostic compositions and methods for the detection of cancer. The present invention provides monoclonal and polyclonal antibodies specific for the CA polypeptides. The present invention also provides diagnostic tools and therapeutic compositions and methods for screening, prevention and treatment of cancer.

### CROSS-REFERENCE TO RELATED APPLICATIONS

[0001] This application is related to the following U.S. applications: U.S. Ser. No. 10/034,650, filed Dec. 20, 2001; U.S. Ser. No. 10/035,832, filed Dec. 26, 2001; U.S. Ser. No. 10/004,113, filed Oct. 23, 2001; U.S. Ser. No. 09/997,722, filed Nov. 30, 2001; U.S. Ser. No. 10/085,117, filed Feb. 27, 2002; U.S. Ser. No. 10/087,192, filed Mar. 1, 2002; U.S. Ser. No. 10/322,281, filed Dec. 17, 2002; U.S. Ser. No. 10/322,696, filed Dec. 17, 2002, U.S. Ser. No. 10/331,053, filed Dec. 26, 2002; U.S. Ser. No. 10/330,773, filed Dec. 27, 2002; U.S. Ser. No. 10/367,094, filed Feb. 14, 2003; U.S. Ser. No. 10/388,838, filed Mar. 14, 2003, U.S. Ser. No. 10/417,375 filed Apr. 15, 2003, and U.S. Ser. No. 10/461,862, filed Jun. 13, 2003, all of which are expressly incorporated herein by reference in their entirety.

### DESCRIPTION OF ACCOMPANYING CD-ROMS

[0002] Tables 1-15 are filed herewith in CD-ROM in accordance with 37 C.F.R. §§ 1.52 and 1.58. Two identical copies (marked “Copy 1” and “Copy 2”) of this CD-ROM are submitted.

[0003] Contents of the CD-ROM disks submitted herewith are hereby incorporated by reference into the Specification.

### TECHNICAL FIELD OF THE INVENTION

[0004] This invention relates generally to the field of cancer-associated genes. Specifically, it relates to novel sequences for use in diagnosis and treatment of cancer and tumors, as well as the use of the novel compositions in screening methods. The present invention provides methods of using cancer associated polynucleotides, their corresponding gene products and antibodies specific for the gene products in the detection, diagnosis, prevention and/or treatment of associated cancers.

### BACKGROUND OF THE INVENTION

[0005] Oncogenes are genes that can cause cancer. Carcinogenesis can occur by a wide variety of mechanisms, including infection of cells by viruses containing oncogenes, activation of protooncogenes in the host genome, and mutations of protooncogenes and tumor suppressor genes. Carcinogenesis is fundamentally driven by somatic cell evolution (i.e. mutation and natural selection of variants with progressive loss of growth control). The genes that serve as targets for these somatic mutations are classified as either protooncogenes or tumor suppressor genes, depending on whether their mutant phenotypes are dominant or recessive, respectively.

[0006] There are a number of viruses known to be involved in human cancer as well as in animal cancer. Of particular interest here are viruses that do not contain oncogenes themselves; these are slow-transforming retroviruses. They induce tumors by integrating into the host genome and affecting neighboring protooncogenes in a variety of ways. Provirus insertion mutation is a normal consequence of the retroviral life cycle. In infected cells, a DNA copy of the retrovirus genome (called a provirus) is integrated into the host genome. A newly integrated provirus can affect gene expression in cis at or near the integration site by one of two mechanisms. Type I insertion mutations up-regulate transcription of proximal genes as a consequence of regulatory sequences (enhancers and/or promoters) within the proviral long terminal repeats (LTRs). Type II insertion mutations cause truncation of coding regions due to either integration directly within an open reading frame or integration within an intron flanked on both sides by coding sequences. The analysis of sequences at or near the insertion sites has led to the identification of a number of new protooncogenes.

[0007] With respect to lymphoma and leukemia, retroviruses such as AKV murine leukemia virus (MLV) or SL3-3 MLV, are potent inducers of tumors when inoculated into susceptible newborn mice, or when carried in the germline. A number of sequences have been identified as relevant in the induction of lymphoma and leukemia by analyzing the insertion sites; see Sorensen et al., J. of Virology 74:2161 (2000); Hansen et al., Genome Res. 10(2):237-43 (2000); Sorensen et al., J. Virology 70:4063 (1996); Sorensen et al., J. Virology 67:7118 (1993); Joosten et al., Virology 268:308 (2000); and Li et al., Nature Genetics 23:348 (1999); all of which are expressly incorporated by reference herein. With respect to cancers, especially breast cancer, prostate cancer and cancers with epithelial origin, the mammalian retrovirus, mouse mammary tumor virus (MMTV) is a potent inducer of tumors when inoculated into susceptible newborn mice, or when carried in the germ line. Mammary Tumors in the Mouse, edited by J. Hilgers and M. Sluyser; Elsevier/North-Holland Biomedical Press; New York, N.Y.

[0008] The pattern of gene expression in a particular living cell is characteristic of its current state. Nearly all differences in the state or type of a cell are reflected in the differences in RNA levels of one or more genes. Comparing expression patterns of uncharacterized genes may provide clues to their function. High throughput analysis of expression of hundreds or thousands of genes can help in (a) identification of complex genetic diseases, (b) analysis of differential gene expression over time, between tissues and disease states, and (c) drug discovery and toxicology studies. Increase or decrease in the levels of expression of certain genes correlate with cancer biology. For example, oncogenes are positive regulators of tumorigenesis, while tumor suppressor genes are negative regulators of tumorigenesis. (Marshall, Cell, 64: 313-326 (1991); Weinberg, Science, 254: 1138-1146 (1991)).

[0009] Accordingly, it is an object of the invention to provide polynucleotide and polypeptide sequences involved in cancer and, in particular, in oncogenesis.

[0010] Immunotherapy, or the use of antibodies for therapeutic purposes has been used in recent years to treat cancer. Passive immunotherapy involves the use of monoclonal antibodies in cancer treatments. See for example, Cancer: Principles and Practice of Oncology, 6^{th} Edition (2001) Chapt. 20 pp. 495-508. Inherent therapeutic biological activity of these antibodies include direct inhibition of tumor cell growth or survival, and the ability to recruit the natural cell killing activity of the body's immune system. These agents are administered alone or in conjunction with radiation or chemotherapeutic agents. Rituxan® and Herceptin®, approved for treatment of lymphoma and breast cancer, respectively, are two examples of such therapeutics. Alternatively, antibodies are used to make antibody conjugates where the antibody is linked to a toxic agent and directs that agent to the tumor by specifically binding to the tumor. Mylotarg® is an example of an approved antibody conjugate used for the treatment of leukemia.

[0011] Accordingly, it is another object of this invention to provide antigens (cancer-associated polypeptides) associated with a variety of cancers as targets for diagnostic and/or therapeutic antibodies. These antigens are also useful for drug discovery (e.g., small molecules) and for further characterization of cellular regulation, growth, and differentiation.

### SUMMARY OF THE INVENTION

[0012] In accordance with the objects outlined above, the present invention provides methods for screening for compositions that modulate cancer, especially lymphoma and leukemia. The present invention also provides methods for screening for compositions which modulate carcinomas, especially mammary adenocarcinomas. Also provided herein are methods of inhibiting proliferation of a cell, preferably a lymphoma cell or a breast cancer cell. Methods of treatment of cancer, including diagnosis, are also provided herein.

[0013] In one aspect, a method of screening drug candidates comprises providing a cell that expresses a cancer-associated (CA) gene or fragments thereof. Preferred embodiments of CA genes are genes that are differentially expressed in cancer cells, preferably lymphatic, breast, prostate or epithelial cells, compared to other cells. Preferred embodiments of CA genes used in the methods herein include, but are not limited to the nucleic acids selected from Tables 1-15 (human genomic sequences of SEQ ID NOS: 4, 16, 26, 34, 42, 54, 70, 80, 92, 108, 114, 120, 130, 142, and 148, and sequences of SEQ ID NOS: 5, 7, 9, 17, 19, 27, 29, 35, 37, 43, 45, 47, 49, 55, 57, 59, 61, 63, 71, 73, 75, 81, 83, 85, 87, 93, 109, 115, 121, 123, 125, 131, 135, 137, 143, 149, 151, 153, 155, 157, 159, 161, 163, 165, and 167 corresponding to the human mRNAs generated therefrom). The methods further include adding a drug candidate to the cell and determining the effect of the drug candidate on the expression of the CA gene.

[0014] In one embodiment, the method of screening drug candidates includes comparing the level of expression in the absence of the drug candidate to the level of expression in the presence of the drug candidate.

[0015] Also provided herein is a method of screening for a bioactive agent capable of binding to a CA protein (CAP), the method comprising combining the CAP and a candidate bioactive agent, and determining the binding of the candidate agent to the CAP.

[0016] Further provided herein is a method for screening for a bioactive agent capable of modulating the activity of a CAP. In one embodiment, the method comprises combining the CAP and a candidate bioactive agent, and determining the effect of the candidate agent on the bioactivity of the CAP.

[0017] Also provided is a method of evaluating the effect of a candidate cancer drug comprising administering the drug to a patient and removing a cell sample from the patient. The expression profile of the cell is then determined. This method may further comprise comparing the expression profile of the patient to an expression profile of a healthy individual.

[0018] In a further aspect, a method for inhibiting the activity of a CA protein is provided. In one embodiment, the method comprises administering to a patient an inhibitor of a CA protein preferably selected from the group consisting of the sequences outlined in Tables 1-15 (SEQ ID NOS: 6, 8, 10, 18, 20, 28, 30, 36, 38, 44, 46, 48, 50, 56, 58, 60, 62, 64, 72, 74, 76, 82, 84, 86, 88, 94, 110, 116, 122, 124, 126, 132, 134, 136, 138, 144, 150, 152, 154, 156, 158, 160, 162, 164, 166, and 168).

[0019] A method of neutralizing the effect of a CA protein, preferably a protein encoded by a nucleic acid selected from the group of sequences outlined in Tables 1-15 (human genomic sequences of SEQ ID NOS: 4, 16, 26, 34, 42, 54, 70, 80, 92, 108, 114, 120, 130, 142, and 148, and sequences of SEQ ID NOS: 5, 7, 9, 17, 19, 27, 29, 35, 37, 43, 45, 47, 49, 55, 57, 59, 61, 63, 71, 73, 75, 81, 83, 85, 87, 93, 109, 115, 121, 123, 125, 131, 135, 137, 143, 149, 151, 153, 155, 157, 159, 161, 163, 165, and 167 corresponding to the human mRNAs generated therefrom), is also provided. Preferably, the method comprises contacting an agent specific for said protein with said protein in an amount sufficient to effect neutralization.

[0020] Moreover, provided herein is a biochip comprising a nucleic acid segment which encodes a CA protein, preferably selected from the sequences outlined in Tables 1-15 (SEQ ID NOS: 5, 7, 13, 15, 21, 29, 31, 33, 35, 37, 39, 41, 49, 51, 57, 59, 65, 67, 75, 77, 79, 81, 87, 89, 91, 93, 99, 105, 107, 109, 115, 117, 123, 125, 131, 137, 139, 145, 147, 153, 155, 161, 167, 169, 171, 173, 175, 177, 179, 181 and 183).

[0021] Also provided herein is a method for diagnosing or determining the propensity to cancers, especially lymphoma or leukemia or carcinoma by sequencing at least one carcinoma or lymphoma gene of an individual. In yet another aspect of the invention, a method is provided for determining cancer including lymphoma and leukemia gene copy numbers in an individual.

[0022] The invention provides an isolated nucleic acid comprising at least 10, 12, 15, or 30 contiguous nucleotides of a sequence selected from the group consisting of the polynucleotide sequences SEQ ID NOS: 5, 7, 9, 17, 19, 27, 29, 35, 37, 43, 45, 47, 49, 55, 57, 59, 61, 63, 71, 73, 75, 81, 83, 85, 87, 93, 109, 115, 121, 123, 125, 131, 135, 137, 143, 149, 151, 153, 155, 157, 159, 161, 163, 165, and 167 shown in Tables 1-15, or its complement, or an expression vector comprising the isolated nucleic acids and host cells comprising them.

[0023] In some embodiments, the polynucleotide, or its complement or a fragment thereof, further comprises a detectable label, is attached to a solid support, is prepared at least in part by chemical synthesis, is an antisense fragment, is single stranded, is double stranded or comprises a microarray.

[0024] The invention provides an isolated polypeptide, encoded within an open reading frame of a CA sequence selected from the group consisting of the polynucleotide sequences of SEQ ID NOS: 4, 16, 26, 34, 42, 54, 70, 80, 92, 108, 114, 120, 130, 142, and 148 shown in Tables 1-15, or its complement. The invention provides an isolated polypeptide, wherein said polypeptide comprises the amino acid sequence encoded by a polynucleotide selected from the group consisting of SEQ ID NOS: 5, 7, 9, 17, 19, 27, 29, 35, 37, 43, 45, 47, 49, 55, 57, 59, 61, 63, 71, 73, 75, 81, 83, 85, 87, 93, 109, 115, 121, 123, 125, 131, 135, 137, 143, 149, 151, 153, 155, 157, 159, 161, 163, 165, and 167 shown in Tables 1-15. The invention provides an isolated polypeptide, wherein said polypeptide comprises the amino acid sequence encoded by a polypeptide selected from the group consisting of SEQ ID NOS: 6, 8, 10, 18, 20, 28, 30, 36, 38, 44, 46, 48, 50, 56, 58, 60, 62, 64, 72, 74, 76, 82, 84, 86, 88, 94, 110, 116, 122, 124, 126, 132, 134, 136, 138, 144, 150, 152, 154, 156, 158, 160, 162, 164, 166, and 168 shown in Tables 1-15.

[0025] The invention further provides an isolated polypeptide, comprising the amino acid sequence of an epitope of the amino acid sequence of a CA polypeptide selected from the group consisting of SEQ ID NOS: 6, 8, 10, 18, 20, 28, 30, 36, 38, 44, 46, 48, 50, 56, 58, 60, 62, 64, 72, 74, 76, 82, 84, 86, 88, 94, 110, 116, 122, 124, 126, 132, 134, 136, 138, 144, 150, 152, 154, 156, 158, 160, 162, 164, 166, and 168 shown in Tables 1-15, wherein the polypeptide or fragment thereof may be attached to a solid support. In one embodiment the invention provides an isolated antibody (monoclonal or polyclonal) or antigen binding fragment thereof, that binds to such a polypeptide. The isolated antibody or antigen binding fragment thereof may be attached to a solid support, or further comprises a detectable label.

[0026] In one embodiment, the invention provides a kit for diagnosing the presence of cancer in a test sample, said kit comprising at least one polynucleotide that selectively hybridizes to a CA polynucleotide sequence shown in Tables 1-15, or its complement. In another embodiment. the invention provides an electronic library comprising a CA polynucleotide, a CA polypeptide, or fragment thereof, shown in Tables 1-15.

[0027] In one embodiment, the invention provides a method of screening for anticancer activity comprising: (a) providing a cell that expresses a cancer associated (CA) gene encoded by a nucleic acid sequence selected from the group consisting of the CA sequences shown in Tables 1-15, or fragment thereof; (b) contacting a tissue sample derived from a cancer cell with an anticancer drug candidate; (c) monitoring an effect of the anticancer drug candidate on an expression of the CA polynucleotide in the tissue sample, and optionally (d) comparing the level of expression in the absence of said drug candidate to the level of expression in the presence of the drug candidate. The drug candidate may be an inhibitor of transcription, a G-protein coupled receptor antagonist, a growth factor antagonist, a serine-threonine kinase antagonist, a tyrosine kinase antagonist.

[0028] In one embodiment, the invention provides a method for detecting cancer associated with expression of a polypeptide in a test cell sample, comprising the steps of: (i) detecting a level of expression of at least one polypeptide selected from the group consisting of SEQ ID NOS: 6, 8, 10, 18, 20, 28, 30, 36, 38, 44, 46, 48, 50, 56, 58, 60, 62, 64, 72, 74, 76, 82, 84, 86, 88, 94, 110, 116, 122, 124, 126, 132, 134, 136, 138, 144, 150, 152, 154, 156, 158, 160, 162, 164, 166, and 168 shown in Tables 1-15, or a fragment thereof; and (ii) comparing the level of expression of the polypeptide in the test sample with a level of expression of polypeptide in a normal cell sample, wherein an altered level of expression of the polypeptide in the test cell sample relative to the level of polypeptide expression in the normal cell sample is indicative of the presence of cancer in the test cell sample.

[0029] In another embodiment, the invention provides a method for detecting cancer associated with expression of a polypeptide in a test cell sample, comprising the steps of: (i) detecting a level of activity of at least one polypeptide selected from the group consisting of SEQ ID NOS: 6, 8, 10, 18, 20, 28, 30, 36, 38, 44, 46, 48, 50, 56, 58, 60, 62, 64, 72, 74, 76, 82, 84, 86, 88, 94, 110, 116, 122, 124, 126, 132, 134, 136, 138, 144, 150, 152, 154, 156, 158, 160, 162, 164, 166, and 168 shown in Tables 1-15, or a fragment thereof, wherein said activity corresponds to at least one activity for the polypeptide listed in Table 17; and (ii) comparing the level of activity of the polypeptide in the test sample with a level of activity of polypeptide in a normal cell sample, wherein an altered level of activity of the polypeptide in the test cell sample relative to the level of polypeptide activity in the normal cell sample is indicative of the presence of cancer in the test cell sample.

[0030] In another embodiment, the invention provides a method for detecting cancer associated with the presence of an antibody in a test serum sample, comprising the steps of: (i) detecting a level of an antibody against an antigenic polypeptide selected from the group consisting of SEQ ID NOS: 6, 8, 10, 18, 20, 28, 30, 36, 38, 44, 46, 48, 50, 56, 58, 60, 62, 64, 72, 74, 76, 82, 84, 86, 88, 94, 110, 116, 122, 124, 126, 132, 134, 136, 138, 144, 150, 152, 154, 156, 158, 160, 162, 164, 166, and 168 shown in Tables 1-15, or antigenic fragment thereof; and (ii) comparing said level of said antibody in the test sample with a level of said antibody in the control sample, wherein an altered level of antibody in said test sample relative to the level of antibody in the control sample is indicative of the presence of cancer in the test serum sample.

[0031] The invention provides a method for screening for a bioactive agent capable of modulating the activity of a CA protein (CAP), wherein said CAP is encoded by a nucleic acid comprising a nucleic acid sequence selected from the group consisting of the polynucleotide sequences SEQ ID NOS: 5, 7, 9, 17, 19, 27, 29, 35, 37, 43, 45, 47, 49, 55, 57, 59, 61, 63, 71, 73, 75, 81, 83, 85, 87, 93, 109, 115, 121, 123, 125, 131, 135, 137, 143, 149, 151, 153, 155, 157, 159, 161, 163, 165, and 167 shown in Tables 1-15, said method comprising: a) combining said CAP and a candidate bioactive agent; and b) determining the effect of the candidate agent on the bioactivity of said CAP. According to the method the bioactive agent: affects the expression of the CA protein (CAP); affects the activity of the CA protein (CAP), wherein such activity is selected from the activities listed in Table 17.

[0032] In one embodiment, the invention provides a method for diagnosing cancer comprising: a) determining the expression of one or more genes comprising a nucleic acid sequence selected from the group consisting of the human genomic and mRNA sequences outlined in Tables 1-15, in a first tissue type of a first individual; and b) comparing said expression of said gene(s) from a second normal tissue type from said first individual or a second unaffected individual; wherein a difference in said expression indicates that the first individual has cancer.

[0033] In another embodiment the invention provides a method for treating cancers comprising administering to a patient a bioactive agent modulating the activity of a CA protein (CAP), wherein said CAP is encoded by a nucleic acid comprising a nucleic acid sequence selected from the group consisting of the human nucleic acid sequences in Tables 1-15 and further wherein the bioactive agent binds to the CA protein; wherein the CA protein: is a sialyl transferase protein wherein the CAP sequence is selected from the group consisting of SEQ ID NOS: 132, 134, 136, and 138; is a low density lipoprotein receptor wherein the CAP sequence is selected from the group consisting of SEQ ID NOS: 28, 30, 44, 46, 48, 50, 122, 122, and 124; is a tumor suppressor protein wherein the CAP sequence is selected from the group consisting of SEQ ID NOS: 84, 86, and 88; is a calcium binding protein wherein the CAP sequence is selected from the group consisting of SEQ ID NOS: 44, 46, 48, 50, 122, 124, 150, 152, 154, 156, 158, 160, 162, 164, 166, and 168; is a protein kinase receptor wherein the CAP sequence is selected from the group consisting of SEQ ID NOS: 72, 74 and 76; is involved in signalling/signal transduction wherein the CAP sequence is selected from the group consisting of SEQ ID NOS: 28, 30, 38, 44, 46, 48, 50, 56, 58, 60, 62, 64, 72, 74, 76, 94, 116, and 144; is a cell adhesion molecule wherein the CAP sequence is selected from the group consisting of SEQ ID NOS: 56, 58, 60, 62, 64, 84, 86, 88, 150, 152, 154, 156, 158, 160, 162, 164, 166, and 168, as shown in Tables 1-15.

[0034] The invention provides monoclonal antibodies that preferentially binds to a CA protein (CAP) that is expressed on a cell surface, wherein the CA protein selected from the group consisting of SEQ ID NOS: 6, 8, 10, 18, 20, 28, 30, 36, 38, 44, 46, 48, 50, 56, 58, 60, 62, 64, 72, 74, 76, 82, 84, 86, 88, 94, 110, 116, 122, 124, 126, 132, 134, 136, 138, 144, 150, 152, 154, 156, 158, 160, 162, 164, 166, and 168; preferably to the extracellular domain of the CA protein; preferably to a CA protein differentially expressed on a cancer cell surface relative to a normal cell surface or preferably to at least one human cancer cell line; preferably linked to a therapeutic agent; or preferably humanized. Kits and pharmaceutical compositions for detecting a presence or an absence of cancer cells in an individual, and comprising such antibodies are also provided.

[0035] The invention also provides a method for detecting a presence or an absence of cancer cells in an individual, the method comprising: contacting cells from the individual with the antibody according to the invention; and detecting a complex of a CAP from the cancer cells and the antibody, wherein detection of the complex correlates with the presence of cancer cells in the individual. In one embodiment the invention provides a method for inhibiting growth of cancer cells in an individual, the method comprising: administering to the individual an effective amount of a pharmaceutical composition according to the invention. In another embodiment the invention provides a method for delivering a therapeutic agent to cancer cells in an individual, the method comprising: administering to the individual an effective amount of a pharmaceutical composition according to according to the invention.

[0036] Novel sequences associated with cancer are also provided herein. Other aspects of the invention will become apparent to the skilled artisan by the following description of the invention.

### BRIEF DESCRIPTION OF THE FIGURES

[0037] FIG. 1 depicts PCR amplification of host-provirus junction fragments.

[0038] FIG. 2 shows an example of average threshold cycle (C_{T}) values for a housekeeper gene and target gene.

[0039] FIG. 3 shows an example of the calculated difference (ΔΔC_{T}) between the C_{T} values of target and housekeeper genes (ΔC_{T}) for various samples.

[0040] FIG. 4 shows the ΔΔC_{T} and comparative expression level for each sample from FIG. 3.

### DETAILED DESCRIPTION OF PREFERRED EMBODIMENTS

[0041] The present invention is directed to a number of sequences associated with cancers, especially lymphoma, breast cancer or prostate cancer. The relatively tight linkage between clonally-integrated proviruses and protooncogenes forms “provirus tagging”, in which slow-transforming retroviruses that act by an insertion mutation mechanism are used to isolate protooncogenes. In some models, uninfected animals have low cancer rates, and infected animals have high cancer rates. It is known that many of the retroviruses involved do not carry transduced host protooncogenes or pathogenic trans-acting viral genes, and thus the cancer incidence must therefore be a direct consequence of proviral integration effects into host protooncogenes. Since proviral integration is random, rare integrants will “activate” host protooncogenes that provide a selective growth advantage, and these rare events result in new proviruses at clonal stoichiometries in tumors. In contrast to mutations caused by chemicals, radiation, or spontaneous errors, protooncogene insertion mutations can be easily located by virtue of the fact that a convenient-sized genetic marker of known sequence (the provirus) is present at the site of mutation. Host sequences that flank clonally integrated proviruses can be cloned using a variety of strategies. Once these sequences are in hand, the tagged protooncogenes can be subsequently identified. The presence of provirus at the same locus in two or more independent tumors is prima facie evidence that a protooncogene is present at or very near the provirus integration sites. This is because the genome is too large for random integrations to result in observable clustering. Any clustering that is detected is unequivocal evidence for biological selection (i.e. the tumor phenotype). Moreover, the pattern of proviral integrants (including orientations) provides compelling positional information that makes localization of the target gene at each cluster relatively simple. The three mammalian retroviruses that are known to cause cancer by an insertion mutation mechanism are FeLV (leukemia/lymphoma in cats), MLV (leukemia/lymphoma in mice and rats), and MMTV (mammary cancer in mice).

[0042] Thus, the use of oncogenic retroviruses, whose sequences insert into the genome of the host organism resulting in cancer, allows the identification of host sequences involved in cancer. These sequences may then be used in a number of different ways, including diagnosis, prognosis, screening for modulators (including both agonists and antagonists), antibody generation (for immunotherapy and imaging), etc. However, as will be appreciated by those in the art, oncogenes that are identified in one type of cancer such as lymphoma or leukemia have a strong likelihood of being involved in other types of cancers as well. Thus, while the sequences outlined herein are initially identified as correlated with lymphoma, they can also be found in other types of cancers as well, outlined below.

Definitions

[0043] Accordingly, the present invention provides nucleic acid and protein sequences that are associated with cancer, herein termed “cancer associated” or “CA” sequences. In one embodiment, the present invention provides nucleic acid and protein sequences that are associated with cancers that originate in lymphatic tissue, herein termed “lymphoma associated,” “leukemia associated” or “LA” sequences. In another embodiment, the present invention provides nucleic acid and protein sequences that are associated with carcinomas which originate in breast tissue, herein termed “breast cancer associated” or “BC” sequences.

[0044] Suitable cancers that can be diagnosed or screened for using the methods of the present invention include cancers classified by site or by histological type. Cancers classified by site include cancer of the oral cavity and pharynx (lip, tongue, salivary gland, floor of mouth, gum and other mouth, nasopharynx, tonsil, oropharynx, hypopharynx, other oral/pharynx); cancers of the digestive system (esophagus; stomach; small intestine; colon and rectum; anus, anal canal, and anorectum; liver; intrahepatic bile duct; gallbladder; other biliary; pancreas; retroperitoneum; peritoneum, omentum, and mesentery; other digestive); cancers of the respiratory system (nasal cavity, middle ear, and sinuses; larynx; lung and bronchus; pleura; trachea, mediastinum, and other respiratory); cancers of the mesothelioma; bones and joints; and soft tissue, including heart; skin cancers, including melanomas and other non-epithelial skin cancers; Kaposi's sarcoma and breast cancer; cancer of the female genital system (cervix uteri; corpus uteri; uterus, nos; ovary; vagina; vulva; and other female genital); cancers of the male genital system (prostate gland; testis; penis; and other male genital); cancers of the urinary system (urinary bladder; kidney and renal pelvis; ureter; and other urinary); cancers of the eye and orbit; cancers of the brain and nervous system (brain; and other nervous system); cancers of the endocrine system (thyroid gland and other endocrine, including thymus); lymphomas (Hodgkin's disease and non-Hodgkin's lymphoma), multiple myeloma, and leukemias (lymphocytic leukemia; myeloid leukemia; monocytic leukemia; and other leukemias).

[0045] Other cancers, classified by histological type, that may be associated with the sequences of the invention include, but are not limited to, Neoplasm, malignant; Carcinoma, NOS; Carcinoma, undifferentiated, NOS; Giant and spindle cell carcinoma; Small cell carcinoma, NOS; Papillary carcinoma, NOS; Squamous cell carcinoma, NOS; Lymphoepithelial carcinoma; Basal cell carcinoma, NOS; Pilomatrix carcinoma; Transitional cell carcinoma, NOS; Papillary transitional cell carcinoma; Adenocarcinoma, NOS; Gastrinoma, malignant; Cholangiocarcinoma; Hepatocellular carcinoma, NOS; Combined hepatocellular carcinoma and cholangiocarcinoma; Trabecular adenocarcinoma; Adenoid cystic carcinoma; Adenocarcinoma in adenomatous polyp; Adenocarcinoma, familial polyposis coli; Solid carcinoma, NOS; Carcinoid tumor, malignant; Bronchiolo-alveolar adenocarcinoma; Papillary adenocarcinoma, NOS; Chromophobe carcinoma; Acidophil carcinoma; Oxyphilic adenocarcinoma; Basophil carcinoma; Clear cell adenocarcinoma, NOS; Granular cell carcinoma; Follicular adenocarcinoma, NOS; Papillary and follicular adenocarcinoma; Nonencapsulating sclerosing carcinoma; Adrenal cortical carcinoma; Endometroid carcinoma; Skin appendage carcinoma; Apocrine adenocarcinoma; Sebaceous adenocarcinoma; Ceruminous adenocarcinoma; Mucoepidermoid carcinoma; Cystadenocarcinoma, NOS; Papillary cystadenocarcinoma, NOS; Papillary serous cystadenocarcinoma; Mucinous cystadenocarcinoma, NOS; Mucinous adenocarcinoma; Signet ring cell carcinoma; Infiltrating duct carcinoma; Medullary carcinoma, NOS; Lobular carcinoma; Inflammatory carcinoma; Paget's disease, mammary; Acinar cell carcinoma; Adenosquamous carcinoma; Adenocarcinoma w/squamous metaplasia; Thymoma, malignant; Ovarian stromal tumor, malignant; Thecoma, malignant; Granulosa cell tumor, malignant; Androblastoma, malignant; Sertoli cell carcinoma; Leydig cell tumor, malignant; Lipid cell tumor, malignant; Paraganglioma, malignant; Extra-mammary paraganglioma, malignant; Pheochromocytoma; Glomangiosarcoma; Malignant melanoma, NOS; Amelanotic melanoma; Superficial spreading melanoma; Malig melanoma in giant pigmented nevus; Epithelioid cell melanoma; Blue nevus, malignant; Sarcoma, NOS; Fibrosarcoma, NOS; Fibrous histiocytoma, malignant; Myxosarcoma; Liposarcoma, NOS; Leiomyosarcoma, NOS; Rhabdomyosarcoma, NOS; Embryonal rhabdomyosarcoma; Alveolar rhabdomyosarcoma; Stromal sarcoma, NOS; Mixed tumor, malignant, NOS; Mullerian mixed tumor; Nephroblastoma; Hepatoblastoma; Carcinosarcoma, NOS; Mesenchymoma, malignant; Brenner tumor, malignant; Phyllodes tumor, malignant; Synovial sarcoma, NOS; Mesothelioma, malignant; Dysgerminoma; Embryonal carcinoma, NOS; Teratoma, malignant, NOS; Struma ovarii, malignant; Choriocarcinoma; Mesonephroma, malignant; Hemangiosarcoma; Hemangioendothelioma, malignant; Kaposi's sarcoma; Hemangiopericytoma, malignant; Lymphangiosarcoma; Osteosarcoma, NOS; Juxtacortical osteosarcoma; Chondrosarcoma, NOS; Chondroblastoma, malignant; Mesenchymal chondrosarcoma; Giant cell tumor of bone; Ewing's sarcoma; Odontogenic tumor, malignant; Ameloblastic odontosarcoma; Ameloblastoma, malignant; Ameloblastic fibrosarcoma; Pinealoma, malignant; Chordoma; Glioma, malignant; Ependymoma, NOS; Astrocytoma, NOS; Protoplasmic astrocytoma; Fibrillary astrocytoma; Astroblastoma; Glioblastoma, NOS; Oligodendroglioma, NOS; Oligodendroblastoma; Primitive neuroectodermal; Cerebellar sarcoma, NOS; Ganglioneuroblastoma; Neuroblastoma, NOS; Retinoblastoma, NOS; Olfactory neurogenic tumor; Meningioma, malignant; Neurofibrosarcoma; Neurilemmoma, malignant; Granular cell tumor, malignant; Malignant lymphoma, NOS; Hodgkin's disease, NOS; Hodgkin's; paragranuloma, NOS; Malignant lymphoma, small lymphocytic; Malignant lymphoma, large cell, diffuse; Malignant lymphoma, follicular, NOS; Mycosis fungoides; Other specified non-Hodgkin's lymphomas; Malignant histiocytosis; Multiple myeloma; Mast cell sarcoma; Immunoproliferative small intestinal disease; Leukemia, NOS; Lymphoid leukemia, NOS; Plasma cell leukemia; Erythroleukemia; Lymphosarcoma cell leukemia; Myeloid leukemia, NOS; Basophilic leukemia; Eosinophilic leukemia; Monocytic leukemia, NOS; Mast cell leukemia; Megakaryoblastic leukemia; Myeloid sarcoma; and Hairy cell leukemia.

[0046] In addition, the CA genes may be involved in other diseases such as, but not limited to, diseases associated with aging or neurodegeneration.

[0047] “Association” in this context means that the nucleotide or protein sequences are either differentially expressed, activated, inactivated or altered in cancers as compared to normal tissue. As outlined below, CA sequences include those that are up-regulated (i.e. expressed at a higher level), as well as those that are down-regulated (i.e. expressed at a lower level), in cancers. CA sequences also include sequences that have been altered (i.e., truncated sequences or sequences with substitutions, deletions or insertions, including point mutations) and show either the same expression profile or an altered profile. In a preferred embodiment, the CA sequences are from humans; however, as will be appreciated by those in the art, CA sequences from other organisms may be useful in animal models of disease and drug evaluation; thus, other CA sequences are provided, from vertebrates, including mammals, including rodents (rats, mice, hamsters, guinea pigs, etc.), primates, and farm animals (including sheep, goats, pigs, cows, horses, etc). In some cases, prokaryotic CA sequences may be useful. CA sequences from other organisms may be obtained using the techniques outlined below.

[0048] CA sequences include both nucleic acid and amino acid sequences. In a preferred embodiment, the CA sequences are recombinant nucleic acids. By the term “recombinant nucleic acid” herein is meant nucleic acid, originally formed in vitro, in general, by the manipulation of nucleic acid by polymerases and endonucleases, in a form not normally found in nature. Thus a recombinant nucleic acid is also an isolated nucleic acid, in a linear form, or cloned in a vector formed in vitro by ligating DNA molecules that are not normally joined, are both considered recombinant for the purposes of this invention. It is understood that once a recombinant nucleic acid is made and reintroduced into a host cell or organism, it will replicate using the in vivo cellular machinery of the host cell rather than in vitro manipulations; however, such nucleic acids, once produced recombinantly, although subsequently replicated in vivo, are still considered recombinant or isolated for the purposes of the invention. As used herein a “polynucleotide” or “nucleic acid” is a polymeric form of nucleotides of any length, either ribonucleotides or deoxyribonucleotides. This term refers only to the primary structure of the molecule. Thus, this term includes double- and single-stranded DNA and RNA. It also includes known types of modifications, for example, labels which are known in the art, methylation, “caps”, substitution of one or more of the naturally occurring nucleotides with an analog, internucleotide modifications such as, for example, those with uncharged linkages (e.g., phosphorothioates, phosphorodithioates, etc.), those containing pendant moieties, such as, for example proteins (including e.g., nucleases, toxins, antibodies, signal peptides, poly-L-lysine, etc.), those with intercalators (e.g., acridine, psoralen, etc.), those containing chelators (e.g., metals, radioactive metals, etc.), those containing alkylators, those with modified linkages (e.g., alpha anomeric nucleic acids, etc.), as well as unmodified forms of the polynucleotide.

[0049] As used herein, a polynucleotide “derived from” a designated sequence refers to a polynucleotide sequence which is comprised of a sequence of approximately at least about 6 nucleotides, preferably at least about 8 nucleotides, more preferably at least about 10-12 nucleotides, and even more preferably at least about 15-20 nucleotides corresponding to a region of the designated nucleotide sequence. “Corresponding” means homologous to or complementary to the designated sequence. Preferably, the sequence of the region from which the polynucleotide is derived is homologous to or complementary to a sequence that is unique to a CA gene.

[0050] Similarly, a “recombinant protein” is a protein made using recombinant techniques, i.e. through the expression of a recombinant nucleic acid as depicted above. A recombinant protein is distinguished from naturally occurring protein by at least one or more characteristics. For example, the protein may be isolated or purified away from some or all of the proteins and compounds with which it is normally associated in its wild type host, and thus may be substantially pure. For example, an isolated protein is unaccompanied by at least some of the material with which it is normally associated in its natural state, preferably constituting at least about 0.5%, more preferably at least about 5% by weight of the total protein in a given sample. A substantially pure protein comprises about 50-75% by weight of the total protein, with about 80% being preferred, and about 90% being particularly preferred. The definition includes the production of a CA protein from one organism in a different organism or host cell. Alternatively, the protein may be made at a significantly higher concentration than is normally seen, through the use of an inducible promoter or high expression promoter, such that the protein is made at increased concentration levels. Alternatively, the protein may be in a form not normally found in nature, as in the addition of an epitope tag or amino acid substitutions, insertions and deletions, as discussed below.

[0051] In a preferred embodiment, the CA sequences are nucleic acids. As will be appreciated by those in the art and is more fully outlined below, CA sequences are useful in a variety of applications, including diagnostic applications, which will detect naturally occurring nucleic acids, as well as screening applications; for example, biochips comprising nucleic acid probes to the CA sequences can be generated. In the broadest sense, use of “nucleic acid,” “polynucleotide” or “oligonucleotide” or equivalents herein means at least two nucleotides covalently linked together. In some embodiments, an oligonucleotide is an oligomer of 6, 8, 10, 12, 20, 30 or up to 100 nucleotides. A “polynucleotide” or “oligonucleotide” may comprise DNA, RNA, PNA or a polymer of nucleotides linked by phosphodiester and/or any alternate bonds.

[0052] A nucleic acid of the present invention generally contains phosphodiester bonds, although in some cases, as outlined below (for example, in antisense applications or when a nucleic acid is a candidate drug agent), nucleic acid analogs may have alternate backbones, comprising, for example, phosphoramidate (Beaucage et al., Tetrahedron 49(10):1925 (1993) and references therein; Letsinger, J. Org. Chem. 35:3800 (1970); Sprinzl et al., Eur. J. Biochem. 81:579 (1977); Letsinger et al., Nucl. Acids Res. 14:3487 (1986); Sawai et al., Chem. Lett. 805 (1984), Letsinger et al., J. Am. Chem. Soc. 110:4470 (1988); and Pauwels et al., Chemica Scripta 26:141 91986)), phosphorothioate (Mag et al., Nucleic Acids Res. 19:1437 (1991); and U.S. Pat. No. 5,644,048), phosphorodithioate (Briu et al., J. Am. Chem. Soc. 111:2321 (1989), O-methylphosphoroamidite linkages (see Eckstein, Oligonucleotides and Analogues: A Practical Approach, Oxford University Press), and peptide nucleic acid backbones and linkages (see Egholm, J. Am. Chem. Soc. 114:1895 (1992); Meier et al., Chem. Int. Ed. Engl. 31:1008 (1992); Nielsen, Nature, 365:566 (1993); Carlsson et al., Nature 380:207 (1996), all of which are incorporated by reference). Other analog nucleic acids include those with positive backbones (Denpcy et al., Proc. Natl. Acad. Sci. USA 92:6097 (1995); non-ionic backbones (U.S. Pat. Nos. 5,386,023, 5,637,684, 5,602,240, 5,216,141 and 4,469,863; Kiedrowshi et al., Angew. Chem. Intl. Ed. English 30:423 (1991); Letsinger et al., J. Am. Chem. Soc. 110:4470 (1988); Letsinger et al., Nucleoside & Nucleotide 13:1597 (1994); Chapters 2 and 3, ASC Symposium Series 580, “Carbohydrate Modifications in Antisense Research”, Ed. Y. S. Sanghui and P. Dan Cook; Mesmaeker et al., Bioorganic & Medicinal Chem. Lett. 4:395 (1994); Jeffs et al., J. Biomolecular NMR 34:17 (1994); Tetrahedron Lett. 37:743 (1996)) and non-ribose backbones, including those described in U.S. Pat. Nos. 5,235,033 and 5,034,506, and Chapters 6 and 7, ASC Symposium Series 580, “Carbohydrate Modifications in Antisense Research”, Ed. Y. S. Sanghui and P. Dan Cook. Nucleic acids containing one or more carbocyclic sugars are also included within one definition of nucleic acids (see Jenkins et al., Chem. Soc. Rev. (1995) pp 169-176). Several nucleic acid analogs are described in Rawls, C & E News Jun. 2, 1997 page 35. All of these references are hereby expressly incorporated by reference. These modifications of the ribose-phosphate backbone may be done for a variety of reasons, for example to increase the stability and half-life of such molecules in physiological environments for use in anti-sense applications or as probes on a biochip.

[0053] As will be appreciated by those in the art, all of these nucleic acid analogs may find use in the present invention. In addition, mixtures of naturally occurring nucleic acids and analogs can be made; alternatively, mixtures of different nucleic acid analogs, and mixtures of naturally occurring nucleic acids and analogs may be made.

[0054] The nucleic acids may be single stranded or double stranded, as specified, or contain portions of both double stranded or single stranded sequence. As will be appreciated by those in the art, the depiction of a single strand “Watson” also defines the sequence of the other strand “Crick”; thus the sequences described herein also includes the complement of the sequence. The nucleic acid may be DNA, both genomic and cDNA, RNA, or a hybrid, where the nucleic acid contains any combination of deoxyribo- and ribo-nucleotides, and any combination of bases, including uracil, adenine, thymine, cytosine, guanine, inosine, xanthine, hypoxanthine, isocytosine, isoguanine, etc. As used herein, the term “nucleoside” includes nucleotides and nucleoside and nucleotide analogs, and modified nucleosides such as amino modified nucleosides. In addition, “nucleoside” includes non-naturally occurring analog structures. Thus for example the individual units of a peptide nucleic acid, each containing a base, are referred to herein as a nucleoside.

[0055] As used herein, the term “tag,” “sequence tag” or “primer tag sequence” refers to an oligonucleotide with specific nucleic acid sequence that serves to identify a batch of polynucleotides bearing such tags therein. Polynucleotides from the same biological source are covalently tagged with a specific sequence tag so that in subsequent analysis the polynucleotide can be identified according to its source of origin. The sequence tags also serve as primers for nucleic acid amplification reactions.

[0056] A “microarray” is a linear or two-dimensional array of preferably discrete regions, each having a defined area, formed on the surface of a solid support. The density of the discrete regions on a microarray is determined by the total numbers of target polynucleotides to be detected on the surface of a single solid phase support, preferably at least about 50/cm², more preferably at least about 100/cm², even more preferably at least about 500/cm², and still more preferably at least about 1,000/cm². As used herein, a DNA microarray is an array of oligonucleotide primers placed on a chip or other surfaces used to amplify or clone target polynucleotides. Since the position of each particular group of primers in the array is known, the identities of the target polynucleotides can be determined based on their binding to a particular position in the microarray.

[0057] A “linker” is a synthetic oligodeoxyribonucleotide that contains a restriction site. A linker may be blunt end-ligated onto the ends of DNA fragments to create restriction sites that can be used in the subsequent cloning of the fragment into a vector molecule.

[0058] The term “label” refers to a composition capable of producing a detectable signal indicative of the presence of the target polynucleotide in an assay sample. Suitable labels include radioisotopes, nucleotide chromophores, enzymes, substrates, fluorescent molecules, chemiluminescent moieties, magnetic particles, bioluminescent moieties, and the like. As such, a label is any composition detectable by spectroscopic, photochemical, biochemical, immunochemical, electrical, optical, chemical, or any other appropriate means. The term “label” is used to refer to any chemical group or moiety having a detectable physical property or any compound capable of causing a chemical group or moiety to exhibit a detectable physical property, such as an enzyme that catalyzes conversion of a substrate into a detectable product. The term “label” also encompasses compounds that inhibit the expression of a particular physical property. The label may also be a compound that is a member of a binding pair, the other member of which bears a detectable physical property.

[0059] The term “support” refers to conventional supports such as beads, particles, dipsticks, fibers, filters, membranes, and silane or silicate supports such as glass slides.

[0060] The term “amplify” is used in the broad sense to mean creating an amplification product which may include, for example, additional target molecules, or target-like molecules or molecules complementary to the target molecule, which molecules are created by virtue of the presence of the target molecule in the sample. In the situation where the target is a nucleic acid, an amplification product can be made enzymatically with DNA or RNA polymerases or reverse transcriptases.

[0061] As used herein, a “biological sample” refers to a sample of tissue or fluid isolated from an individual, including but not limited to, for example, blood, plasma, serum, spinal fluid, lymph fluid, skin, respiratory, intestinal and genitourinary tracts, tears, saliva, milk, cells (including but not limited to blood cells), tumors, organs, and also samples of in vitro cell culture constituents.

[0062] The term “biological sources” as used herein refers to the sources from which the target polynucleotides are derived. The source can be of any form of “sample” as described above, including but not limited to, cell, tissue or fluid. “Different biological sources” can refer to different cells/tissues/organs of the same individual, or cells/tissues/organs from different individuals of the same species, or cells/tissues/organs from different species.

Cancer-Associated Sequences

[0063] The CA sequences of the invention were initially identified by infection of mice with a retrovirus such as murine leukemia virus (MLV) resulting in lymphoma. Retroviruses have a genome that is made out of RNA. After a retrovirus infects a host cell, a double stranded DNA copy of the retrovirus genome (a “provirus”) is inserted into the genomic DNA of the host cell. The integrated provirus may affect the expression of host genes at or near the site of integration—a phenomenon known as retroviral insertional mutagenesis. Possible changes in the expression of host cell genes include: (i) increased expression of genes near the site of integration resulting from the proximity of elements in the provirus that act as transcriptional promoters and enhancers, (ii) functional inactivation of a gene caused by the integration of a provirus into the gene itself thus preventing the synthesis of a functional gene product, or (iii) expression of a mutated protein that has a different activity to the normal protein. Typically such a protein would be prematurely truncated and lack a regulatory domain near the C terminus. Such a protein might be constitutively active, or act as a dominant negative inhibitor of the normal protein. For example, retrovirus enhancers, including that of SL3-3, are known to act on genes up to approximately 200 kilobases from the insertion site. Moreover, many of these sequences are also involved in other cancers and disease states. Sequences of mouse genes according to this invention, that are identified in this manner are shown as mDxx-yyy in Tables 1-15.

[0064] A CA sequence can be initially identified by substantial nucleic acid and/or amino acid sequence homology to the CA sequences outlined herein. Such homology can be based upon the overall nucleic acid or amino acid sequence, and is generally determined as outlined below, using either homology programs or hybridization conditions.

[0065] In one embodiment, CA sequences are those that are up-regulated in cancers; that is, the expression of these genes is higher in cancer tissue as compared to normal tissue of the same differentiation stage. “Up-regulation” as used herein means increased expression by about 50%, preferably about 100%, more preferably about 150% to about 200%, with up-regulation from 300% to 1000% being preferred.

[0066] In another embodiment, CA sequences are those that are down-regulated in cancers; that is, the expression of these genes is lower in cancer tissue as compared to normal tissue of the same differentiation stage. “Down-regulation” as used herein means decreased expression by about 50%, preferably about 100%, more preferably about 150% to about 200%, with down-regulation from 300% to 1000% to no expression being preferred.

[0067] In yet another embodiment, CA sequences are those that have altered sequences but show either the same or an altered expression profile as compared to normal lymphoid tissue of the same differentiation stage. “Altered CA sequences” as used herein also refers to sequences that are truncated, contain insertions or contain point mutations.

[0068] CA proteins of the present invention may be classified as secreted proteins, transmembrane proteins or intracellular proteins. In a preferred embodiment the CA protein is an intracellular protein. Intracellular proteins may be found in the cytoplasm and/or in the nucleus. Intracellular proteins are involved in all aspects of cellular function and replication (including, for example, signaling pathways); aberrant expression of such proteins results in unregulated or disregulated cellular processes. For example, many intracellular proteins have enzymatic activity such as protein kinase activity, protein phosphatase activity, protease activity, nucleotide cyclase activity, polymerase activity and the like. Intracellular proteins also serve as docking proteins that are involved in organizing complexes of proteins, or targeting proteins to various subcellular localizations, and are involved in maintaining the structural integrity of organelles.

[0069] An increasingly appreciated concept in characterizing intracellular proteins is the presence in the proteins of one or more motifs for which defined functions have been attributed. In addition to the highly conserved sequences found in the enzymatic domain of proteins, highly conserved sequences have been identified in proteins that are involved in protein-protein interaction. For example, Src-homology-2 (SH2) domains bind tyrosine-phosphorylated targets in a sequence dependent manner. PTB domains, which are distinct from SH2 domains, also bind tyrosine phosphorylated targets. SH3 domains bind to proline-rich targets. In addition, PH domains, tetratricopeptide repeats and WD domains to name only a few, have been shown to mediate protein-protein interactions. Some of these may also be involved in binding to phospholipids or other second messengers. As will be appreciated by one of ordinary skill in the art, these motifs can be identified on the basis of primary sequence; thus, an analysis of the sequence of proteins may provide insight into both the enzymatic potential of the molecule and/or molecules with which the protein may associate.

[0070] In a preferred embodiment, the CA sequences are transmembrane proteins. Transmembrane proteins are molecules that span the phospholipid bilayer of a cell. They may have an intracellular domain, an extracellular domain, or both. The intracellular domains of such proteins may have a number of functions including those already described for intracellular proteins. For example, the intracellular domain may have enzymatic activity and/or may serve as a binding site for additional proteins. Frequently the intracellular domain of transmembrane proteins serves both roles. For example certain receptor tyrosine kinases have both protein kinase activity and SH2 domains. In addition, autophosphorylation of tyrosines on the receptor molecule itself creates binding sites for additional SH2 domain containing proteins.

[0071] Transmembrane proteins may contain from one to many transmembrane domains. For example, receptor tyrosine kinases, certain cytokine receptors, receptor guanylyl cyclases and receptor serine/threonine protein kinases contain a single transmembrane domain. However, various other proteins including channels and adenylyl cyclases contain numerous transmembrane domains. Many important cell surface receptors are classified as “seven transmembrane domain” proteins, as they contain 7 membrane spanning regions. Important transmembrane protein receptors include, but are not limited to insulin receptor, insulin-like growth factor receptor, human growth hormone receptor, glucose transporters, transferrin receptor, epidermal growth factor receptor, low density lipoprotein receptor, leptin receptor, interleukin receptors, e.g. IL-1 receptor, IL-2 receptor, etc. CA proteins may be derived from genes that regulate apoptosis (IL-3, GM-CSF and Bcl-x) or are shown to have a role in the regulation of apoptosis.

[0072] Characteristics of transmembrane domains include approximately 20 consecutive hydrophobic amino acids that may be followed by charged amino acids. Therefore, upon analysis of the amino acid sequence of a particular protein, the localization and number of transmembrane domains within the protein may be predicted.

[0073] The extracellular domains of transmembrane proteins are diverse; however, conserved motifs are found repeatedly among various extracellular domains. Conserved structure and/or functions have been ascribed to different extracellular motifs. For example, cytokine receptors are characterized by a cluster of cysteines and a WSXWS (W=tryptophan, S=serine, X=any amino acid) motif. Immunoglobulin-like domains are highly conserved. Mucin-like domains may be involved in cell adhesion and leucine-rich repeats participate in protein-protein interactions.

[0074] Many extracellular domains are involved in binding to other molecules. In one aspect, extracellular domains are receptors. Factors that bind the receptor domain include circulating ligands, which may be peptides, proteins, or small molecules such as adenosine and the like. For example, growth factors such as EGF, FGF and PDGF are circulating growth factors that bind to their cognate receptors to initiate a variety of cellular responses. Other factors include cytokines, mitogenic factors, neurotrophic factors and the like. Extracellular domains also bind to cell-associated molecules. In this respect, they mediate cell-cell interactions. Cell-associated ligands can be tethered to the cell for example via a glycosylphosphatidylinositol (GPI) anchor, or may themselves be transmembrane proteins. Extracellular domains also associate with the extracellular matrix and contribute to the maintenance of the cell structure.

[0075] CA proteins that are transmembrane are particularly preferred in the present invention as they are good targets for immunotherapeutics, as are described herein. In addition, as outlined below, transmembrane proteins can be also useful in imaging modalities.

[0076] It will also be appreciated by those in the art that a transmembrane protein can be made soluble by removing transmembrane sequences, for example through recombinant methods. Furthermore, transmembrane proteins that have been made soluble can be made to be secreted through recombinant means by adding an appropriate signal sequence.

[0077] In a preferred embodiment, the CA proteins are secreted proteins; the secretion of which can be either constitutive or regulated. These proteins have a signal peptide or signal sequence that targets the molecule to the secretory pathway. Secreted proteins are involved in numerous physiological events; by virtue of their circulating nature, they serve to transmit signals to various other cell types. The secreted protein may function in an autocrine manner (acting on the cell that secreted the factor), a paracrine manner (acting on cells in close proximity to the cell that secreted the factor) or an endocrine manner (acting on cells at a distance). Thus secreted molecules find use in modulating or altering numerous aspects of physiology. CA proteins that are secreted proteins are particularly preferred in the present invention as they serve as good targets for diagnostic markers, for example for blood tests.

CA Sequences and Homologs

[0078] A CA sequence is initially identified by substantial nucleic acid and/or amino acid sequence homology to the CA sequences outlined herein. Such homology can be based upon the overall nucleic acid or amino acid sequence, and is generally determined as outlined below, using either homology programs or hybridization conditions.

[0079] As used herein, a nucleic acid is a “CA nucleic acid” if the overall homology of the nucleic acid sequence to one of the nucleic acids of Tables 1-15 is preferably greater than about 75%, more preferably greater than about 80%, even more preferably greater than about 85% and most preferably greater than 90%. In some embodiments the homology will be as high as about 93 to 95 or 98%. In a preferred embodiment, the sequences that are used to determine sequence identity or similarity are selected from those of the nucleic acids of Tables 1-15. In another embodiment, the sequences are naturally occurring allelic variants of the sequences of the nucleic acids of Tables 1-15. In another embodiment, the sequences are sequence variants as further described herein.

[0080] Homology in this context means sequence similarity or identity, with identity being preferred. A preferred comparison for homology purposes is to compare the sequence containing sequencing errors to the correct sequence. This homology will be determined using standard techniques known in the art, including, but not limited to, the local homology algorithm of Smith & Waterman, Adv. Appl. Math. 2:482 (1981), by the homology alignment algorithm of Needleman & Wunsch, J. Mol. Biol. 48:443 (1970), by the search for similarity method of Pearson & Lipman, PNAS USA 85:2444 (1988), by computerized implementations of these algorithms (GAP, BESTFIT, FASTA, and TFASTA in the Wisconsin Genetics Software Package, Genetics Computer Group, 575 Science Drive, Madison, Wis.), the Best Fit sequence program described by Devereux et al., Nucl. Acid Res. 12:387-395 (1984), preferably using the default settings, or by inspection.

[0081] One example of a useful algorithm is PILEUP. PILEUP creates a multiple sequence alignment from a group of related sequences using progressive, pairwise alignments. It can also plot a tree showing the clustering relationships used to create the alignment. PILEUP uses a simplification of the progressive alignment method of Feng & Doolittle, J. Mol. Evol. 35:351-360 (1987); the method is similar to that described by Higgins & Sharp CABIOS 5:151-153 (1989). Useful PILEUP parameters include a default gap weight of 3.00, a default gap length weight of 0.10, and weighted end gaps.

[0082] Another example of a useful algorithm is the BLAST (Basic Local Alignment Search Tool) algorithm, described in Altschul et al., J. Mol. Biol. 215, 403-410, (1990) and Karlin et al., PNAS USA 90:5873-5787 (1993). A particularly useful BLAST program is the WU-BLAST-2 program which was obtained from Altschul et al., Methods in Enzymology, 266: 460-480 (1996); http://blast.wustl.edu/]. WU-BLAST-2 uses several search parameters, most of which are set to the default values. The adjustable parameters are set with the following values: overlap span=1, overlap fraction=0.125, word threshold (T)=11. The HSP S and HSP S2 parameters are dynamic values and are established by the program itself depending upon the composition of the particular sequence and composition of the particular database against which the sequence of interest is being searched; however, the values may be adjusted to increase sensitivity. A percent amino acid sequence identity value is determined by the number of matching identical residues divided by the total number of residues of the “longer” sequence in the aligned region. The “longer” sequence is the one having the most actual residues in the aligned region (gaps introduced by WU-Blast-2 to maximize the alignment score are ignored).

[0083] Thus, “percent (%) nucleic acid sequence identity” is defined as the percentage of nucleotide residues in a candidate sequence that are identical with the nucleotide residues of the nucleic acids of Tables 1-15. A preferred method utilizes the BLASTN module of WU-BLAST-2 set to the default parameters, with overlap span and overlap fraction set to 1 and 0.125, respectively.

[0084] The alignment may include the introduction of gaps in the sequences to be aligned. In addition, for sequences which contain either more or fewer nucleotides than those of the nucleic acids of Tables 1-15, it is understood that the percentage of homology will be determined based on the number of homologous nucleosides in relation to the total number of nucleosides. Thus homology of sequences shorter than those of the sequences identified herein will be determined using the number of nucleosides in the shorter sequence.

[0085] In another embodiment of the invention, polynucleotide compositions are provided that are capable of hybridizing under moderate to high stringency conditions to a polynucleotide sequence provided herein, or a fragment thereof, or a complementary sequence thereof. Hybridization techniques are well known in the art of molecular biology. For purposes of illustration, suitable moderately stringent conditions for testing the hybridization of a polynucleotide of this invention with other polynucleotides include prewashing in a solution of 5×SSC (“saline sodium citrate”; 9 mM NaCl, 0.9 mM sodium citrate), 0.5% SDS, 1.0 mM EDTA (pH 8.0); hybridizing at 50-60° C., 5×SSC, overnight; followed by washing twice at 65° C. for 20 minutes with each of 2×, 0.5× and 0.2×SSC containing 0.1% SDS. One skilled in the art will understand that the stringency of hybridization can be readily manipulated, such as by altering the salt content of the hybridization solution and/or the temperature at which the hybridization is performed. For example, in another embodiment, suitable highly stringent hybridization conditions include those described above, with the exception that the temperature of hybridization is increased, e.g., to 60-65° C., or 65-70° C. Stringent conditions may also be achieved with the addition of destabilizing agents such as formamide.

[0086] Thus nucleic acids that hybridize under high stringency to the nucleic acids identified in the figures, or their complements, are considered CA sequences. High stringency conditions are known in the art; see for example Maniatis et al., Molecular Cloning: A Laboratory Manual, 2d Edition, 1989, and Short Protocols in Molecular Biology, ed. Ausubel, et al., both of which are hereby incorporated by reference. Stringent conditions are sequence-dependent and will be different in different circumstances. Longer sequences hybridize specifically at higher temperatures. An extensive guide to the hybridization of nucleic acids is found in Tijssen, Techniques in Biochemistry and Molecular Biology—Hybridization with Nucleic Acid Probes, “Overview of principles of hybridization and the strategy of nucleic acid assays” (1993). Generally, stringent conditions are selected to be about 5-10° C. lower than the thermal melting point (Tₘ) for the specific sequence at a defined ionic strength pH. The Tₘ is the temperature (under defined ionic strength, pH and nucleic acid concentration) at which 50% of the probes complementary to the target hybridize to the target sequence at equilibrium (as the target sequences are present in excess, at Tₘ, 50% of the probes are occupied at equilibrium). Stringent conditions will be those in which the salt concentration is less than about 1.0 M sodium ion, typically about 0.01 to 1.0 M sodium ion concentration (or other salts) at pH 7.0 to 8.3 and the temperature is at least about 30° C. for short probes (e.g. 10 to 50 nucleotides) and at least about 60° C. for longer probes (e.g. greater than 50 nucleotides). In another embodiment, less stringent hybridization conditions are used; for example, moderate or low stringency conditions may be used, as are known in the art; see Maniatis and Ausubel, supra, and Tijssen, supra.

[0087] In addition, the CA nucleic acid sequences of the invention are fragments of larger genes, i.e. they are nucleic acid segments. Alternatively, the CA nucleic acid sequences can serve as indicators of oncogene position, for example, the CA sequence may be an enhancer that activates a protooncogene. “Genes” in this context includes coding regions, non-coding regions, and mixtures of coding and non-coding regions. Accordingly, as will be appreciated by those in the art, using the sequences provided herein, additional sequences of the CA genes can be obtained, using techniques well known in the art for cloning either longer sequences or the full-length sequences; see Maniatis et al., and Ausubel, et al., supra, hereby expressly incorporated by reference. In general, this is done using PCR, for example, kinetic PCR.

Detection of CA Expression

[0088] Once the CA nucleic acid is identified, it can be cloned and, if necessary, its constituent parts recombined to form the entire CA nucleic acid. Once isolated from its natural source, e.g., contained within a plasmid or other vector or excised therefrom as a linear nucleic acid segment, the recombinant CA nucleic acid can be further used as a probe to identify and isolate other CA nucleic acids, for example additional coding regions. It can also be used as a “precursor” nucleic acid to make modified or variant CA nucleic acids and proteins. In a preferred embodiment, once a CA gene is identified its nucleotide sequence is used to design probes specific for the CA gene.

[0089] The CA nucleic acids of the present invention are used in several ways. In a first embodiment, nucleic acid probes hybridizable to CA nucleic acids are made and attached to biochips to be used in screening and diagnostic methods, or for gene therapy and/or antisense applications. Alternatively, the CA nucleic acids that include coding regions of CA proteins can be put into expression vectors for the expression of CA proteins, again either for screening purposes or for administration to a patient.

[0090] Recent developments in DNA microarray technology make it possible to conduct a large scale assay of a plurality of target CA nucleic acid molecules on a single solid phase support. U.S. Pat. No. 5,837,832 (Chee et al.) and related patent applications describe immobilizing an array of oligonucleotide probes for hybridization and detection of specific nucleic acid sequences in a sample. Target polynucleotides of interest isolated from a tissue of interest are hybridized to the DNA chip and the specific sequences detected based on the target polynucleotides' preference and degree of hybridization at discrete probe locations. One important use of arrays is in the analysis of differential gene expression, where the profile of expression of genes in different cells, often a cell of interest and a control cell, is compared and any differences in gene expression among the respective cells are identified. Such information is useful for the identification of the types of genes expressed in a particular cell or tissue type and diagnosis of cancer conditions based on the expression profile.

[0091] Typically, RNA from the sample of interest is subjected to reverse transcription to obtain labeled cDNA. See U.S. Pat. No. 6,410,229 (Lockhart et al.) The cDNA is then hybridized to oligonucleotides or cDNAs of known sequence arrayed on a chip or other surface in a known order. The location of the oligonucleotide to which the labeled cDNA hybridizes provides sequence information on the cDNA, while the amount of labeled hybridized RNA or cDNA provides an estimate of the relative representation of the RNA or cDNA of interest. See Schena, et al. Science 270:467-470 (1995). For example, use of a cDNA microarray to analyze gene expression patterns in human cancer is described by DeRisi, et al. (Nature Genetics 14:457-460 (1996)).

[0092] In a preferred embodiment, nucleic acid probes corresponding to CA nucleic acids (both the nucleic acid sequences outlined in the figures and/or the complements thereof) are made. Typically, these probes are synthesized based on the disclosed sequences of this invention. The nucleic acid probes attached to the biochip are designed to be substantially complementary to the CA nucleic acids, i.e. the target sequence (either the target sequence of the sample or to other probe sequences, for example in sandwich assays), such that specific hybridization of the target sequence and the probes of the present invention occurs. As outlined below, this complementarity need not be perfect, in that there may be any number of base pair mismatches that will interfere with hybridization between the target sequence and the single stranded nucleic acids of the present invention. It is expected that the overall homology of the genes at the nucleotide level probably will be about 40% or greater, probably about 60% or greater, and even more probably about 80% or greater; and in addition that there will be corresponding contiguous sequences of about 8-12 nucleotides or longer. However, if the number of mutations is so great that no hybridization can occur under even the least stringent of hybridization conditions, the sequence is not a complementary target sequence. Thus, by “substantially complementary” herein is meant that the probes are sufficiently complementary to the target sequences to hybridize under normal reaction conditions, particularly high stringency conditions, as outlined herein. Whether or not a sequence is unique to a CA gene according to this invention can be determined by techniques known to those of skill in the art. For example, the sequence can be compared to sequences in databanks, e.g., GeneBank, to determine whether it is present in the uninfected host or other organisms. The sequence can also be compared to the known sequences of other viral agents, including those that are known to induce cancer.

[0093] A nucleic acid probe is generally single stranded but can be partly single and partly double stranded. The strandedness of the probe is dictated by the structure, composition, and properties of the target sequence. In general, the oligonucleotide probes range from about 6, 8, 10, 12, 15, 20, 30 to about 100 bases long, with from about 10 to about 80 bases being preferred, and from about 30 to about 50 bases being particularly preferred. That is, generally entire genes are rarely used as probes. In some embodiments, much longer nucleic acids can be used, up to hundreds of bases. The probes are sufficiently specific to hybridize to complementary template sequence under conditions known by those of skill in the art. The number of mismatches between the probes sequences and their complementary template (target) sequences to which they hybridize during hybridization generally do not exceed 15%, usually do not exceed 10% and preferably do not exceed 5%, as determined by FASTA (default settings).

[0094] Oligonucleotide probes can include the naturally-occurring heterocyclic bases normally found in nucleic acids (uracil, cytosine, thymine, adenine and guanine), as well as modified bases and base analogues. Any modified base or base analogue compatible with hybridization of the probe to a target sequence is useful in the practice of the invention. The sugar or glycoside portion of the probe can comprise deoxyribose, ribose, and/or modified forms of these sugars, such as, for example, 2′-O-alkyl ribose. In a preferred embodiment, the sugar moiety is 2′-deoxyribose; however, any sugar moiety that is compatible with the ability of the probe to hybridize to a target sequence can be used.

[0095] In one embodiment, the nucleoside units of the probe are linked by a phosphodiester backbone, as is well known in the art. In additional embodiments, internucleotide linkages can include any linkage known to one of skill in the art that is compatible with specific hybridization of the probe including, but not limited to phosphorothioate, methylphosphonate, sulfamate (e.g., U.S. Pat. No. 5,470,967) and polyamide (i.e., peptide nucleic acids). Peptide nucleic acids are described in Nielsen et al. (1991) Science 254: 1497-1500, U.S. Pat. No. 5,714,331, and Nielsen (1999) Curr. Opin. Biotechnol. 10:71-75.

[0096] In certain embodiments, the probe can be a chimeric molecule; i.e., can comprise more than one type of base or sugar subunit, and/or the linkages can be of more than one type within the same primer. The probe can comprise a moiety to facilitate hybridization to its target sequence, as are known in the art, for example, intercalators and/or minor groove binders. Variations of the bases, sugars, and internucleoside backbone, as well as the presence of any pendant group on the probe, will be compatible with the ability of the probe to bind, in a sequence-specific fashion, with its target sequence. A large number of structural modifications, both known and to be developed, are possible within these bounds. Advantageously, the probes according to the present invention may have structural characteristics such that they allow the signal amplification, such structural characteristics being, for example, branched DNA probes as those described by Urdea et al. (Nucleic Acids Symp. Ser., 24:197-200 (1991)) or in the European Patent No. EP-0225,807. Moreover, synthetic methods for preparing the various heterocyclic bases, sugars, nucleosides and nucleotides that form the probe, and preparation of oligonucleotides of specific predetermined sequence, are well-developed and known in the art. A preferred method for oligonucleotide synthesis incorporates the teaching of U.S. Pat. No. 5,419,966.

[0097] Multiple probes may be designed for a particular target nucleic acid to account for polymorphism and/or secondary structure in the target nucleic acid, redundancy of data and the like. In some embodiments, where more than one probe per sequence is used, either overlapping probes or probes to different sections of a single target CA gene are used. That is, two, three, four or more probes, with three being preferred, are used to build in a redundancy for a particular target. The probes can be overlapping (i.e. have some sequence in common), or specific for distinct sequences of a CA gene. When multiple target polynucleotides are to be detected according to the present invention, each probe or probe group corresponding to a particular target polynucleotide is situated in a discrete area of the microarray.

[0098] Probes may be in solution, such as in wells or on the surface of a micro-array, or attached to a solid support. Examples of solid support materials that can be used include a plastic, a ceramic, a metal, a resin, a gel and a membrane. Useful types of solid supports include plates, beads, magnetic material, microbeads, hybridization chips, membranes, crystals, ceramics and self-assembling monolayers. A preferred embodiment comprises a two-dimensional or three-dimensional matrix, such as a gel or hybridization chip with multiple probe binding sites (Pevzner et al., J. Biomol. Struc. & Dyn. 9:399-410, 1991; Maskos and Southern, Nuc. Acids Res. 20:1679-84, 1992). Hybridization chips can be used to construct very large probe arrays that are subsequently hybridized with a target nucleic acid. Analysis of the hybridization pattern of the chip can assist in the identification of the target nucleotide sequence. Patterns can be manually or computer analyzed, but it is clear that positional sequencing by hybridization lends itself to computer analysis and automation. Algorithms and software, which have been developed for sequence reconstruction, are applicable to the methods described herein (R. Drmanac et al., J. Biomol. Struc. & Dyn. 5:1085-1102, 1991; P. A. Pevzner, J. Biomol. Struc. & Dyn. 7:63-73, 1989).

[0099] As will be appreciated by those in the art, nucleic acids can be attached or immobilized to a solid support in a wide variety of ways. By “immobilized” herein is meant the association or binding between the nucleic acid probe and the solid support is sufficient to be stable under the conditions of binding, washing, analysis, and removal as outlined below. The binding can be covalent or non-covalent. By “non-covalent binding” and grammatical equivalents herein is meant one or more of either electrostatic, hydrophilic, and hydrophobic interactions. Included in non-covalent binding is the covalent attachment of a molecule, such as streptavidin, to the support and the non-covalent binding of the biotinylated probe to the streptavidin. By “covalent binding” and grammatical equivalents herein is meant that the two moieties, the solid support and the probe, are attached by at least one bond, including sigma bonds, pi bonds and coordination bonds. Covalent bonds can be formed directly between the probe and the solid support or can be formed by a cross linker or by inclusion of a specific reactive group on either the solid support or the probe or both molecules. Immobilization may also involve a combination of covalent and non-covalent interactions.

[0100] Nucleic acid probes may be attached to the solid support by covalent binding such as by conjugation with a coupling agent or by, covalent or non-covalent binding such as electrostatic interactions, hydrogen bonds or antibody-antigen coupling, or by combinations thereof. Typical coupling agents include biotin/avidin, biotin/streptavidin, Staphylococcus aureus protein A/IgG antibody F_{c} fragment, and streptavidin/protein A chimeras (T. Sano and C. R. Cantor, Bio/Technology 9:1378-81 (1991)), or derivatives or combinations of these agents. Nucleic acids may be attached to the solid support by a photocleavable bond, an electrostatic bond, a disulfide bond, a peptide bond, a diester bond or a combination of these sorts of bonds. The array may also be attached to the solid support by a selectively releasable bond such as 4,4′-dimethoxytrityl or its derivative. Derivatives which have been found to be useful include 3 or 4[bis-(4-methoxyphenyl)]-methyl-benzoic acid, N-succinimidyl-3 or 4[bis-(4-methoxyphenyl)]-methyl-benzoic acid, N-succinimidyl-3 or 4[bis-(4-methoxyphenyl)]-hydroxymethyl-benzoic acid, N-succinimidyl-3 or 4[bis-(4-methoxyphenyl)]-chloromethyl-benzoic acid, and salts of these acids.

[0101] In general, the probes are attached to the biochip in a wide variety of ways, as will be appreciated by those in the art. As described herein, the nucleic acids can either be synthesized first, with subsequent attachment to the biochip, or can be directly synthesized on the biochip.

[0102] The biochip comprises a suitable solid substrate. By “substrate” or “solid support” or other grammatical equivalents herein is meant any material that can be modified to contain discrete individual sites appropriate for the attachment or association of the nucleic acid probes and is amenable to at least one detection method. The solid phase support of the present invention can be of any solid materials and structures suitable for supporting nucleotide hybridization and synthesis. Preferably, the solid phase support comprises at least one substantially rigid surface on which the primers can be immobilized and the reverse transcriptase reaction performed. The substrates with which the polynucleotide microarray elements are stably associated may be fabricated from a variety of materials, including plastics, ceramics, metals, acrylamide, cellulose, nitrocellulose, glass, polystyrene, polyethylene vinyl acetate, polypropylene, polymethacrylate, polyethylene, polyethylene oxide, polysilicates, polycarbonates, Teflon®, fluorocarbons, nylon, silicon rubber, polyanhydrides, polyglycolic acid, polylacetic acid, polyorthoesters, polypropylfumerate, collagen, glycosaminoglycans, and polyamino acids. Substrates may be two-dimensional or three-dimensional in form, such as gels, membranes, thin films, glasses, plates, cylinders, beads, magnetic beads, optical fibers, woven fibers, etc. A preferred form of array is a three-dimensional array. A preferred three-dimensional array is a collection of tagged beads. Each tagged bead has different primers attached to it. Tags are detectable by signaling means such as color (Luminex, Illumina) and electromagnetic field (Pharmaseq) and signals on tagged beads can even be remotely detected (e.g., using optical fibers). The size of the solid support can be any of the standard microarray sizes, useful for DNA microarray technology, and the size may be tailored to fit the particular machine being used to conduct a reaction of the invention. In general, the substrates allow optical detection and do not appreciably fluoresce.

[0103] In a preferred embodiment, the surface of the biochip and the probe may be derivatized with chemical functional groups for subsequent attachment of the two. Thus, for example, the biochip is derivatized with a chemical functional group including, but not limited to, amino groups, carboxy groups, oxo groups and thiol groups, with amino groups being particularly preferred. Using these functional groups, the probes can be attached using functional groups on the probes. For example, nucleic acids containing amino groups can be attached to surfaces comprising amino groups, for example using linkers as are known in the art; for example, homo- or hetero-bifunctional linkers as are well known (see 1994 Pierce Chemical Company catalog, technical section on cross-linkers, pages 155-200, incorporated herein by reference). In addition, in some cases, additional linkers, such as alkyl groups (including substituted and heteroalkyl groups) may be used.

[0104] In this embodiment, the oligonucleotides are synthesized as is known in the art, and then attached to the surface of the solid support. As will be appreciated by those skilled in the art, either the 5′ or 3′ terminus may be attached to the solid support, or attachment may be via an internal nucleoside. In an additional embodiment, the immobilization to the solid support may be very strong, yet non-covalent. For example, biotinylated oligonucleotides can be made, which bind to surfaces covalently coated with streptavidin, resulting in attachment.

[0105] The arrays may be produced according to any convenient methodology, such as preforming the polynucleotide microarray elements and then stably associating them with the surface. Alternatively, the oligonucleotides may be synthesized on the surface, as is known in the art. A number of different array configurations and methods for their production are known to those of skill in the art and disclosed in WO 95/25116 and WO 95/35505 (photolithographic techniques), U.S. Pat. No. 5,445,934 (in situ synthesis by photolithography), U.S. Pat. No. 5,384,261 (in situ synthesis by mechanically directed flow paths); and U.S. Pat. No. 5,700,637 (synthesis by spotting, printing or coupling); the disclosure of which are herein incorporated in their entirety by reference. Another method for coupling DNA to beads uses specific ligands attached to the end of the DNA to link to ligand-binding molecules attached to a bead. Possible ligand-binding partner pairs include biotin-avidin/streptavidin, or various antibody/antigen pairs such as digoxygenin-antidigoxygenin antibody (Smith et al., “Direct Mechanical Measurements of the Elasticity of Single DNA Molecules by Using Magnetic Beads,” Science 258:1122-1126 (1992)). Covalent chemical attachment of DNA to the support can be accomplished by using standard coupling agents to link the 5′-phosphate on the DNA to coated microspheres through a phosphoamidate bond. Methods for immobilization of oligonucleotides to solid-state substrates are well established. See Pease et al., Proc. Natl. Acad. Sci. USA 91(11):5022-5026 (1994). A preferred method of attaching oligonucleotides to solid-state substrates is described by Guo et al., Nucleic Acids Res. 22:5456-5465 (1994). Immobilization can be accomplished either by in situ DNA synthesis (Maskos and Southern, Nucleic Acids Research, 20:1679-1684 (1992) or by covalent attachment of chemically synthesized oligonucleotides (Guo et al., supra) in combination with robotic arraying technologies.

[0106] In addition to the solid-phase technology represented by biochip arrays, gene expression can also be quantified using liquid-phase arrays. One such system is kinetic polymerase chain reaction (PCR). Kinetic PCR allows for the simultaneous amplification and quantification of specific nucleic acid sequences. The specificity is derived from synthetic oligonucleotide primers designed to preferentially adhere to single-stranded nucleic acid sequences bracketing the target site. This pair of oligonucleotide primers form specific, non-covalently bound complexes on each strand of the target sequence. These complexes facilitate in vitro transcription of double-stranded DNA in opposite orientations. Temperature cycling of the reaction mixture creates a continuous cycle of primer binding, transcription, and re-melting of the nucleic acid to individual strands. The result is an exponential increase of the target dsDNA product. This product can be quantified in real time either through the use of an intercalating dye or a sequence specific probe. SYBR® Greene I, is an example of an intercalating dye, that preferentially binds to dsDNA resulting in a concomitant increase in the fluorescent signal. Sequence specific probes, such as used with TaqMan® technology, consist of a fluorochrome and a quenching molecule covalently bound to opposite ends of an oligonucleotide. The probe is designed to selectively bind the target DNA sequence between the two primers. When the DNA strands are synthesized during the PCR reaction, the fluorochrome is cleaved from the probe by the exonuclease activity of the polymerase resulting in signal dequenching. The probe signaling method can be more specific than the intercalating dye method, but in each case, signal strength is proportional to the dsDNA product produced. Each type of quantification method can be used in multi-well liquid phase arrays with each well representing primers and/or probes specific to nucleic acid sequences of interest. When used with messenger RNA preparations of tissues or cell lines, an array of probe/primer reactions can simultaneously quantify the expression of multiple gene products of interest. See Germer, S., et al., Genome Res. 10:258-266 (2000); Heid, C. A., et al., Genome Res. 6, 986-994 (1996).

Expression of CA Proteins

[0107] In a preferred embodiment, CA nucleic acids encoding CA proteins are used to make a variety of expression vectors to express CA proteins which can then be used in screening assays, as described below. The expression vectors may be either self-replicating extrachromosomal vectors or vectors which integrate into a host genome. Generally, these expression vectors include transcriptional and translational regulatory nucleic acid operably linked to the nucleic acid encoding the CA protein. The term “control sequences” refers to DNA sequences necessary for the expression of an operably linked coding sequence in a particular host organism. The control sequences that are suitable for prokaryotes, for example, include a promoter, optionally an operator sequence, and a ribosome binding site. Eukaryotic cells are known to utilize promoters, polyadenylation signals, and enhancers.

[0108] Nucleic acid is “operably linked” when it is placed into a functional relationship with another nucleic acid sequence. For example, DNA for a presequence or secretory leader is operably linked to DNA for a polypeptide if it is expressed as a preprotein that participates in the secretion of the polypeptide; a promoter or enhancer is operably linked to a coding sequence if it affects the transcription of the sequence; or a ribosome binding site is operably linked to a coding sequence if it is positioned so as to facilitate translation. Generally, “operably linked” means that the DNA sequences being linked are contiguous, and, in the case of a secretory leader, contiguous and in reading phase. However, enhancers do not have to be contiguous. Linking is accomplished by ligation at convenient restriction sites. If such sites do not exist, synthetic oligonucleotide adaptors or linkers are used in accordance with conventional practice. The transcriptional and translational regulatory nucleic acid will generally be appropriate to the host cell used to express the CA protein; for example, transcriptional and translational regulatory nucleic acid sequences from Bacillus are preferably used to express the CA protein in Bacillus. Numerous types of appropriate expression vectors, and suitable regulatory sequences are known in the art for a variety of host cells.

[0109] In general, the transcriptional and translational regulatory sequences may include, but are not limited to, promoter sequences, ribosomal binding sites, transcriptional start and stop sequences, translational start and stop sequences, and enhancer or activator sequences. In a preferred embodiment, the regulatory sequences include a promoter and transcriptional start and stop sequences.

[0110] Promoter sequences encode either constitutive or inducible promoters. The promoters may be either naturally occurring promoters or hybrid promoters. Hybrid promoters, which combine elements of more than one promoter, are also known in the art, and are useful in the present invention.

[0111] In addition, the expression vector may comprise additional elements. For example, the expression vector may have two replication systems, thus allowing it to be maintained in two organisms, for example in mammalian or insect cells for expression and in a prokaryotic host for cloning and amplification. Furthermore, for integrating expression vectors, the expression vector contains at least one sequence homologous to the host cell genome, and preferably two homologous sequences that flank the expression construct. The integrating vector may be directed to a specific locus in the host cell by selecting the appropriate homologous sequence for inclusion in the vector. Constructs for integrating vectors are well known in the art.

[0112] In addition, in a preferred embodiment, the expression vector contains a selectable marker gene to allow the selection of transformed host cells. Selection genes are well known in the art and will vary with the host cell used.

[0113] The CA proteins of the present invention are produced by culturing a host cell transformed with an expression vector containing nucleic acid encoding a CA protein, under the appropriate conditions to induce or cause expression of the CA protein. The conditions appropriate for CA protein expression will vary with the choice of the expression vector and the host cell, and will be easily ascertained by one skilled in the art through routine experimentation. For example, the use of constitutive promoters in the expression vector will require optimizing the growth and proliferation of the host cell, while the use of an inducible promoter requires the appropriate growth conditions for induction. In addition, in some embodiments, the timing of the harvest is important. For example, the baculoviral systems used in insect cell expression are lytic viruses, and thus harvest time selection can be crucial for product yield.

[0114] Appropriate host cells include yeast, bacteria, archaebacteria, fungi, and insect, plant and animal cells, including mammalian cells. Of particular interest are Drosophila melanogaster cells, Saccharomyces cerevisiae and other yeasts, E. coli, Bacillus subtilis, Sf9 cells, C129 cells, 293 cells, Neurospora, BHK, CHO, COS, HeLa cells, THP1 cell line (a macrophage cell line) and human cells and cell lines.

[0115] In a preferred embodiment, the CA proteins are expressed in mammalian cells. Mammalian expression systems are also known in the art, and include retroviral systems. A preferred expression vector system is a retroviral vector system such as is generally described in PCT/US97/01019 and PCT/US97/01048, both of which are hereby expressly incorporated by reference. Of particular use as mammalian promoters are the promoters from mammalian viral genes, since the viral genes are often highly expressed and have a broad host range. Examples include the SV40 early promoter, mouse mammary tumor virus LTR promoter, adenovirus major late promoter, herpes simplex virus promoter, and the CMV promoter. Typically, transcription termination and polyadenylation sequences recognized by mammalian cells are regulatory regions located 3′ to the translation stop codon and thus, together with the promoter elements, flank the coding sequence. Examples of transcription terminator and polyadenylation signals include those derived form SV40.

[0116] The methods of introducing exogenous nucleic acid into mammalian hosts, as well as other hosts, are well known in the art, and will vary with the host cell used. Techniques include dextran-mediated transfection, calcium phosphate precipitation, polybrene mediated transfection, protoplast fusion, electroporation, viral infection, encapsulation of the polynucleotide(s) in liposomes, and direct microinjection of the DNA into nuclei.

[0117] In a preferred embodiment, CA proteins are expressed in bacterial systems. Bacterial expression systems are well known in the art. Promoters from bacteriophage may also be used and are known in the art. In addition, synthetic promoters and hybrid promoters are also useful; for example, the tac promoter is a hybrid of the trp and lac promoter sequences. Furthermore, a bacterial promoter can include naturally occurring promoters of non-bacterial origin that have the ability to bind bacterial RNA polymerase and initiate transcription. In addition to a functioning promoter sequence, an efficient ribosome binding site is desirable. The expression vector may also include a signal peptide sequence that provides for secretion of the CA protein in bacteria. The protein is either secreted into the growth media (gram-positive bacteria) or into the periplasmic space, located between the inner and outer membrane of the cell (gram-negative bacteria). The bacterial expression vector may also include a selectable marker gene to allow for the selection of bacterial strains that have been transformed. Suitable selection genes include genes that render the bacteria resistant to drugs such as ampicillin, chloramphenicol, erythromycin, kanamycin, neomycin and tetracycline. Selectable markers also include biosynthetic genes, such as those in the histidine, tryptophan and leucine biosynthetic pathways. These components are assembled into expression vectors. Expression vectors for bacteria are well known in the art, and include vectors for Bacillus subtilis, E. coli, Streptococcus cremoris, and Streptococcus lividans, among others. The bacterial expression vectors are transformed into bacterial host cells using techniques well known in the art, such as calcium chloride treatment, electroporation, and others.

[0118] In one embodiment, CA proteins are produced in insect cells. Expression vectors for the transformation of insect cells, and in particular, baculovirus-based expression vectors, are well known in the art.

[0119] In a preferred embodiment, CA protein is produced in yeast cells. Yeast expression systems are well known in the art, and include expression vectors for Saccharomyces cerevisiae, Candida albicans and C. maltosa, Hansenula polymorpha, Kluyveromyces fragilis and K. lactis, Pichia guillerimondii and P. pastoris, Schizosaccharomyces pombe, and Yarrowia lipolytica.

[0120] The CA protein may also be made as a fusion protein, using techniques well known in the art. Thus, for example, for the creation of monoclonal antibodies. If the desired epitope is small, the CA protein may be fused to a carrier protein to form an immunogen. Alternatively, the CA protein may be made as a fusion protein to increase expression, or for other reasons. For example, when the CA protein is a CA peptide, the nucleic acid encoding the peptide may be linked to other nucleic acid for expression purposes.

[0121] In one embodiment, the CA nucleic acids, proteins and antibodies of the invention are labeled. By “labeled” herein is meant that a compound has at least one element, isotope or chemical compound attached to enable the detection of the compound. In general, labels fall into three classes: a) isotopic labels, which may be radioactive or heavy isotopes; b) immune labels, which may be antibodies or antigens; and c) colored or fluorescent dyes. The labels may be incorporated into the CA nucleic acids, proteins and antibodies at any position. For example, the label should be capable of producing, either directly or indirectly, a detectable signal. The detectable moiety may be a radioisotope, such as ³H, ¹⁴C, ³²P, ³⁵S, or ¹²⁵I, a fluorescent or chemiluminescent compound, such as fluorescein isothiocyanate, rhodamine, or luciferin, or an enzyme, such as alkaline phosphatase, beta-galactosidase or horseradish peroxidase. Any method known in the art for conjugating the antibody to the label may be employed, including those methods described by Hunter et al., Nature, 144:945 (1962); David et al., Biochemistry, 13:1014 (1974); Pain et al., J. Immunol. Meth., 40:219 (1981); and Nygren, J. Histochem. and Cytochem., 30:407 (1982).

[0122] Accordingly, the present invention also provides CA protein sequences. A CA protein of the present invention may be identified in several ways. “Protein” in this sense includes proteins, polypeptides, and peptides. As will be appreciated by those in the art, the nucleic acid sequences of the invention can be used to generate protein sequences. There are a variety of ways to do this, including cloning the entire gene and verifying its frame and amino acid sequence, or by comparing it to known sequences to search for homology to provide a frame, assuming the CA protein has homology to some protein in the database being used. Generally, the nucleic acid sequences are input into a program that will search all three frames for homology. This is done in a preferred embodiment using the following NCBI Advanced BLAST parameters. The program is blastx or blastn. The database is nr. The input data is as “Sequence in FASTA format”. The organism list is “none”. The “expect” is 10; the filter is default. The “descriptions” is 500, the “alignments” is 500, and the “alignment view” is pairwise. The “query Genetic Codes” is standard (1). The matrix is BLOSUM 62; gap existence cost is 11, per residue gap cost is 1; and the lambda ratio is 0.85 default. This results in the generation of a putative protein sequence.

[0123] In general, the term “polypeptide” as used herein refers to both the full-length polypeptide encoded by the recited polynucleotide, the polypeptide encoded by the gene represented by the recited polynucleotide, as well as portions or fragments thereof. The present invention encompasses variants of the naturally occurring proteins, wherein such variants are homologous or substantially similar to the naturally occurring protein, and can be of an origin of the same or different species as the naturally occurring protein (e.g., human, murine, or some other species that naturally expresses the recited polypeptide, usually a mammalian species). In general, variant polypeptides have a sequence that has at least about 80%, at least about 81%, at least about 82%, at least about 83%, at least about 84%, at least about 85%, at least about 86%, at least about 87%, at least about 88%, at least about 89%, usually at least about 90%, at least 91%, at least 92%, at least 93%, at least 94%, at least 95%, at least 96%, at least 97%, at least 98% and more usually at least about 99% sequence identity with a differentially expressed polypeptide described herein, as determined by the Smith-Waterman homology search algorithm using an affine gap search with a gap open penalty of 12 and a gap extension penalty of 2, BLOSUM matrix of 62. The Smith-Waterman homology search algorithm is taught in Smith and Waterman, Adv. Appl. Math. (1981) 2: 482-489. The variant polypeptides can be naturally or non-naturally glycosylated, i.e., the polypeptide has a glycosylation pattern that differs from the glycosylation pattern found in the corresponding naturally occurring protein.

[0124] Also within the scope of the invention are variants. Variants of polypeptides include mutants, fragments, and fusions. Mutants can include amino acid substitutions, additions or deletions. The amino acid substitutions can be conservative amino acid substitutions or substitutions to eliminate non-essential amino acids, such as to alter a glycosylation site, a phosphorylation site or an acetylation site, or to minimize misfolding by substitution or deletion of one or more cysteine residues that are not necessary for function. Conservative amino acid substitutions are those that preserve the general charge, hydrophobicity/hydrophilicity, and/or steric bulk of the amino acid substituted. Variants can be designed so as to retain or have enhanced biological activity of a particular region of the protein (e.g., a functional domain and/or, where the polypeptide is a member of a protein family, a region associated with a consensus sequence). Selection of amino acid alterations for production of variants can be based upon the accessibility (interior vs. exterior) of the amino acid (see, e.g., Go et al., Int. J. Peptide Protein Res. (1980) 15:211), the thermostability of the variant polypeptide (see, e.g., Querol et al., Prot. Eng. (1996) 9:265), desired glycosylation sites (see, e.g., Olsen and Thomsen, J. Gen. Microbiol. (1991) 137:579), desired disulfide bridges (see, e.g., Clarke et al., Biochemistry (1993) 32:4322; and Wakarchuk et al., Protein Eng. (1994) 7:1379), desired metal binding sites (see, e.g., Toma et al., Biochemistry (1991) 30:97, and Haezerbrouck et al., Protein Eng. (1993) 6:643), and desired substitutions within proline loops (see, e.g., Masul et al., Appl. Env. Microbiol. (1994) 60:3579). Cysteine-depleted muteins can be produced as disclosed in U.S. Pat. No. 4,959,314.

[0125] Variants also include fragments of the polypeptides disclosed herein, particularly biologically active fragments and/or fragments corresponding to functional domains. Fragments of interest will typically be at least about 8 amino acids (aa) 10 aa, 15 aa, 20 aa, 25 aa, 30 aa, 35 aa, 40 aa, to at least about 45 aa in length, usually at least about 50 aa in length, at least about 75 aa, at least about 100 aa, at least about 125 aa, at least about 150 aa in length, at least about 200 aa, at least about 300 aa, at least about 400 aa and can be as long as 500 aa in length or longer, but will usually not exceed about 1000 aa in length, where the fragment will have a stretch of amino acids that is identical to a polypeptide encoded by a polynucleotide having a sequence of any one of the polynucleotide sequences provided herein, or a homolog thereof. The protein variants described herein are encoded by polynucleotides that are within the scope of the invention. The genetic code can be used to select the appropriate codons to construct the corresponding variants.

[0126] While altered expression of the polynucleotides associated with cancer is observed, altered levels of expression of the polypeptides encoded by these polynucleotides may likely play a role in cancers.

[0127] Also included within one embodiment of CA proteins are amino acid variants of the naturally occurring sequences, as determined herein. Preferably, the variants are preferably greater than about 75% homologous to the wild-type sequence, more preferably greater than about 80%, even more preferably greater than about 85% and most preferably greater than 90%. The present application is also directed to proteins containing polypeptides at least 80%, 85%, 90%, 95%, 96%, 97%, 98% or 99% identical to a CA polypeptide sequence set forth herein. As for nucleic acids, homology in this context means sequence similarity or identity, with identity being preferred. This homology will be determined using standard techniques known in the art as are outlined above for the nucleic acid homologies.

[0128] CA proteins of the present invention may be shorter or longer than the wild type amino acid sequences. Thus, in a preferred embodiment, included within the definition of CA proteins are portions or fragments of the wild type sequences herein. In addition, as outlined above, the CA nucleic acids of the invention may be used to obtain additional coding regions, and thus additional protein sequence, using techniques known in the art.

[0129] In a preferred embodiment, the CA proteins are derivative or variant CA proteins as compared to the wild-type sequence. That is, as outlined more fully below, the derivative CA peptide will contain at least one amino acid substitution, deletion or insertion, with amino acid substitutions being particularly preferred. The amino acid substitution, insertion or deletion may occur at any residue within the CA peptide.

[0130] Also included in an embodiment of CA proteins of the present invention are amino acid sequence variants. These variants fall into one or more of three classes: substitutional, insertional or deletional variants. These variants ordinarily are prepared by site-specific mutagenesis of nucleotides in the DNA encoding the CA protein, using cassette or PCR mutagenesis or other techniques well known in the art, to produce DNA encoding the variant, and thereafter expressing the DNA in recombinant cell culture as outlined above. However, variant CA protein fragments having up to about 100-150 residues may be prepared by in vitro synthesis using established techniques. Amino acid sequence variants are characterized by the predetermined nature of the variation, a feature that sets them apart from naturally occurring allelic or interspecies variation of the CA protein amino acid sequence. The variants typically exhibit the same qualitative biological activity as the naturally occurring analogue, although variants can also be selected which have modified characteristics as will be more fully outlined below.

[0131] While the site or region for introducing an amino acid sequence variation is predetermined, the mutation per se need not be predetermined. For example, in order to optimize the performance of a mutation at a given site, random mutagenesis may be conducted at the target codon or region and the expressed CA variants screened for the optimal combination of desired activity. Techniques for making substitution mutations at predetermined sites in DNA having a known sequence are well known, for example, M13 primer mutagenesis and LAR mutagenesis. Screening of the mutants is done using assays of CA protein activities.

[0132] Amino acid substitutions are typically of single residues; insertions usually will be on the order of from about 1 to 20 amino acids, although considerably larger insertions may be tolerated. Deletions range from about 1 to about 20 residues, although in some cases deletions may be much larger.

[0133] Substitutions, deletions, insertions or any combination thereof may be used to arrive at a final derivative. Generally these changes are done on a few amino acids to minimize the alteration of the molecule. However, larger changes may be tolerated in certain circumstances. When small alterations in the characteristics of the CA protein are desired, substitutions are generally made in accordance with the following chart:

CHART 1

| Original Residue | Exemplary Substitutions |
|---|---|
| Ala | Ser |
| Arg | Lys |
| Asn | Gln, His |
| Asp | Glu |
| Cys | Ser |
| Gln | Asn |
| Glu | Asp |
| Gly | Pro |
| His | Asn, Gln |
| Ile | Leu, Val |
| Leu | Ile, Val |
| Lys | Arg, Gln, Glu |
| Met | Leu, Ile |
| Phe | Met, Leu, Tyr |
| Ser | Thr |
| Thr | Ser |
| Trp | Tyr |
| Tyr | Trp, Phe |
| Val | Ile, Leu |

[0134] Substantial changes in function or immunological identity are made by selecting substitutions that are less conservative than those shown in Chart I. For example, substitutions may be made full length to more significantly affect one or more of the following: the structure of the polypeptide backbone in the area of the alteration (e.g., the alpha-helical or beta-sheet structure); the charge or hydrophobicity of the molecule at the target site; and the bulk of the side chain. The substitutions which in general are expected to produce the greatest changes in the polypeptide's properties are those in which (a) a hydrophilic residue, e.g. seryl or threonyl is substituted for (or by) a hydrophobic residue, e.g. leucyl, isoleucyl, phenylalanyl, valyl or alanyl; (b) a cysteine or proline is substituted for (or by) any other residue; (c) a residue having an electropositive side chain, e.g. lysyl, arginyl, or histidyl, is substituted for (or by) an electronegative residue, e.g. glutamyl or aspartyl; or (d) a residue having a bulky side chain, e.g. phenylalanine, is substituted for (or by) one not having a side chain, e.g. glycine.

[0135] The variants typically exhibit the same qualitative biological activity and will elicit the same immune response as the naturally-occurring analogue, although variants also are selected to modify the characteristics of the CA proteins as needed. Alternatively, the variant may be designed such that the biological activity of the CA protein is altered. For example, glycosylation sites may be altered or removed, dominant negative mutations created, etc.

[0136] Covalent modifications of CA polypeptides are included within the scope of this invention, for example for use in screening. One type of covalent modification includes reacting targeted amino acid residues of a CA polypeptide with an organic derivatizing agent that is capable of reacting with selected side chains or the N- or C-terminal residues of a CA polypeptide. Derivatization with bifunctional agents is useful, for instance, for crosslinking CA polypeptides to a water-insoluble support matrix or surface for use in the method for purifying anti-CA antibodies or screening assays, as is more fully described below. Commonly used crosslinking agents include, e.g., 1,1-bis(diazoacetyl)-2-phenylethane, glutaraldehyde, N-hydroxysuccinimide esters, for example, esters with 4-azidosalicylic acid, homobifunctional imidoesters, including disuccinimidyl esters such as 3,3′-dithiobis(succinimidylpropionate), bifunctional maleimides such as bis-N-maleimido-1,8-octane and agents such as methyl-3-[(p-azidophenyl)dithio]propioimidate.

[0137] Other modifications include deamidation of glutaminyl and asparaginyl residues to the corresponding glutamyl and aspartyl residues, respectively, hydroxylation of proline and lysine, phosphorylation of hydroxyl groups of seryl, threonyl or tyrosyl residues, methylation of the a-amino groups of lysine, arginine, and histidine side chains [T. E. Creighton, Proteins: Structure and Molecular Properties, W.H. Freeman & Co., San Francisco, pp. 79-86 (1983)], acetylation of the N-terminal amine, and amidation of any C-terminal carboxyl group.

[0138] Another type of covalent modification of the CA polypeptide included within the scope of this invention comprises altering the native glycosylation pattern of the polypeptide. “Altering the native glycosylation pattern” is intended for purposes herein to mean deleting one or more carbohydrate moieties found in native sequence CA polypeptide, and/or adding one or more glycosylation sites that are not present in the native sequence CA polypeptide.

[0139] Addition of glycosylation sites to CA polypeptides may be accomplished by altering the amino acid sequence thereof. The alteration may be made, for example, by the addition of, or substitution by, one or more serine or threonine residues to the native sequence CA polypeptide (for O-linked glycosylation sites). The CA amino acid sequence may optionally be altered through changes at the DNA level, particularly by mutating the DNA encoding the CA polypeptide at preselected bases such that codons are generated that will translate into the desired amino acids.

[0140] Another means of increasing the number of carbohydrate moieties on the CA polypeptide is by chemical or enzymatic coupling of glycosides to the polypeptide. Such methods are described in the art, e.g., in WO 87/05330 published 11 Sep. 1987, and in Aplin and Wriston, L A Crit. Rev. Biochem., pp. 259-306 (1981).

[0141] Removal of carbohydrate moieties present on the CA polypeptide may be accomplished chemically or enzymatically or by mutational substitution of codons encoding for amino acid residues that serve as targets for glycosylation. Chemical deglycosylation techniques are known in the art and described, for instance, by Hakimuddin, et al., Arch. Biochem. Biophys., 259:52 (1987) and by Edge et al., Anal. Biochem., 118:131 (1981). Enzymatic cleavage of carbohydrate moieties on polypeptides can be achieved by the use of a variety of endo- and exo-glycosidases as described by Thotakura et al., Meth. Enzymol., 138:350 (1987).

[0142] Another type of covalent modification of CA comprises linking the CA polypeptide to one of a variety of nonproteinaceous polymers, e.g., polyethylene glycol, polypropylene glycol, or polyoxyalkylenes, in the manner set forth in U.S. Pat. Nos. 4,640,835; 4,496,689; 4,301,144; 4,670,417; 4,791,192 or 4,179,337.

[0143] CA polypeptides of the present invention may also be modified in a way to form chimeric molecules comprising a CA polypeptide fused to another, heterologous polypeptide or amino acid sequence. In one embodiment, such a chimeric molecule comprises a fusion of a CA polypeptide with a tag polypeptide that provides an epitope to which an anti-tag antibody can selectively bind. The epitope tag is generally placed at the amino- or carboxyl-terminus of the CA polypeptide, although internal fusions may also be tolerated in some instances. The presence of such epitope-tagged forms of a CA polypeptide can be detected using an antibody against the tag polypeptide. Also, provision of the epitope tag enables the CA polypeptide to be readily purified by affinity purification using an anti-tag antibody or another type of affinity matrix that binds to the epitope tag. In an alternative embodiment, the chimeric molecule may comprise a fusion of a CA polypeptide with an immunoglobulin or a particular region of an immunoglobulin. For a bivalent form of the chimeric molecule, such a fusion could be to the Fc region of an IgG molecule.

[0144] Various tag polypeptides and their respective antibodies are well known in the art. Examples include poly-histidine (poly-his) or poly-histidine-glycine (poly-his-gly) tags; the flu HA tag polypeptide and its antibody 12CA5 [Field et al., Mol. Cell. Biol., 8:2159-2165 (1988)]; the c-myc tag and the 8F9, 3C7, 6E10, G4, B7 and 9E10 antibodies thereto [Evan et al., Molecular and Cellular Biology, 5:3610-3616 (1985)]; and the Herpes Simplex virus glycoprotein D (gD) tag and its antibody [Paborsky et al., Protein Engineering, 3(6):547-553 (1990)]. Other tag polypeptides include the Flag-peptide [Hopp et al., BioTechnology, 6:1204-1210 (1988)]; the KT3 epitope peptide [Martin et al., Science, 255:192-194 (1992)]; tubulin epitope peptide [Skinner et al., J. Biol. Chem., 266:15163-15166 (1991)]; and the T7 gene 10 protein peptide tag [Lutz-Freyermuth et al., Proc. Natl. Acad. Sci. USA, 87:6393-6397 (1990)].

[0145] Also included with the definition of CA protein in one embodiment are other CA proteins of the CA family, and CA proteins from other organisms, which are cloned and expressed as outlined below. Thus, probe or degenerate polymerase chain reaction (PCR) primer sequences may be used to find other related CA proteins from humans or other organisms. As will be appreciated by those in the art, particularly useful probe and/or PCR primer sequences include the unique areas of the CA nucleic acid sequence. As is generally known in the art, preferred PCR primers are from about 15 to about 35 nucleotides in length, with from about 20 to about 30 being preferred, and may contain inosine as needed. The conditions for the PCR reaction are well known in the art.

[0146] In addition, as is outlined herein, CA proteins can be made that are longer than those encoded by the nucleic acids of the figures, for example, by the elucidation of additional sequences, the addition of epitope or purification tags, the addition of other fusion sequences, etc.

[0147] CA proteins may also be identified as being encoded by CA nucleic acids. Thus, CA proteins are encoded by nucleic acids that will hybridize to the sequences of the sequence listings, or their complements, as outlined herein.

CA Antigens and Antibodies Thereto

[0148] In one embodiment, the invention provides CA specific antibodies. In a preferred embodiment, when the CA protein is to be used to generate antibodies, for example for immunotherapy, the CA protein should share at least one epitope or determinant with the full-length protein. By “epitope” or “determinant” herein is meant a portion of a protein that will generate and/or bind an antibody or T-cell receptor in the context of MHC. Thus, in most instances, antibodies made to a smaller CA protein will be able to bind to the full-length protein. In a preferred embodiment, the epitope is unique; that is, antibodies generated to a unique epitope show little or no cross-reactivity.

[0149] Any polypeptide sequence encoded by the CA polynucleotide sequences may be analyzed to determine certain preferred regions of the polypeptide. Regions of high antigenicity are determined from data by DNASTAR analysis by choosing values that represent regions of the polypeptide that are likely to be exposed on the surface of the polypeptide in an environment in which antigen recognition may occur in the process of initiation of an immune response. For example, the amino acid sequence of a polypeptide encoded by a CA polynucleotide sequence may be analyzed using the default parameters of the DNASTAR computer algorithm (DNASTAR, Inc., Madison, Wis.; http://www.dnastar.com/).

[0150] Polypeptide features that may be routinely obtained using the DNASTAR computer algorithm include, but are not limited to, Garnier-Robson alpha-regions, beta-regions, turn-regions, and coil-regions (Garnier et al. J. Mol. Biol., 120: 97 (1978)); Chou-Fasman alpha-regions, beta-regions, and turn-regions (Adv. in Enzymol., 47:45-148 (1978)); Kyte-Doolittle hydrophilic regions and hydrophobic regions (J. Mol. Biol., 157:105-132 (1982)); Eisenberg alpha- and beta-amphipathic regions; Karplus-Schulz flexible regions; Emini surface-forming regions (J. Virol., 55(3):836-839 (1985)); and Jameson-Wolf regions of high antigenic index (CABIOS, 4(1):181-186 (1988)). Kyte-Doolittle hydrophilic regions and hydrophobic regions, Emini surface-forming regions, and Jameson-Wolf regions of high antigenic index (i.e., containing four or more contiguous amino acids having an antigenic index of greater than or equal to 1.5, as identified using the default parameters of the Jameson-Wolf program) can routinely be used to determine polypeptide regions that exhibit a high degree of potential for antigenicity. One approach for preparing antibodies to a protein is the selection and preparation of an amino acid sequence of all or part of the protein, chemically synthesizing the sequence and injecting it into an appropriate animal, typically a rabbit, hamster or a mouse. Oligopeptides can be selected as candidates for the production of an antibody to the CA protein based upon the oligopeptides lying in hydrophilic regions, which are thus likely to be exposed in the mature protein. Additional oligopeptides can be determined using, for example, the Antigenicity Index, Welling, G. W. et al., FEBS Lett. 188:215-218 (1985), incorporated herein by reference.

[0151] In one embodiment, the term “antibody” includes antibody fragments, as are known in the art, including Fab, Fab₂, single chain antibodies (Fv for example), chimeric antibodies, etc., either produced by the modification of whole antibodies or those synthesized de novo using recombinant DNA technologies.

[0152] Methods of preparing polyclonal antibodies are known to the skilled artisan. Polyclonal antibodies can be raised in a mammal, for example, by one or more injections of an immunizing agent and, if desired, an adjuvant. Typically, the immunizing agent and/or adjuvant will be injected in the mammal by multiple subcutaneous or intraperitoneal injections. The immunizing agent may include a protein encoded by a nucleic acid of the figures or fragment thereof or a fusion protein thereof. It may be useful to conjugate the immunizing agent to a protein known to be immunogenic in the mammal being immunized. Examples of such immunogenic proteins include but are not limited to keyhole limpet hemocyanin, serum albumin, bovine thyroglobulin, and soybean trypsin inhibitor. Examples of adjuvants that may be employed include Freund's complete adjuvant and MPL-TDM adjuvant (monophosphoryl Lipid A, synthetic trehalose dicorynomycolate). The immunization protocol may be selected by one skilled in the art without undue experimentation.

[0153] The antibodies may, alternatively, be monoclonal antibodies. Monoclonal antibodies may be prepared using hybridoma methods, such as those described by Kohler and Milstein, Nature, 256:495 (1975). In a hybridoma method, a mouse, hamster, or other appropriate host animal, is typically immunized with an immunizing agent to elicit lymphocytes that produce or are capable of producing antibodies that will specifically bind to the immunizing agent. Alternatively, the lymphocytes may be immunized in vitro. The immunizing agent will typically include a polypeptide encoded by a nucleic acid of Tables 1-15, or fragment thereof or a fusion protein thereof. Generally, either peripheral blood lymphocytes (“PBLs”) are used if cells of human origin are desired, or spleen cells or lymph node cells are used if non-human mammalian sources are desired. The lymphocytes are then fused with an immortalized cell line using a suitable fusing agent, such as polyethylene glycol, to form a hybridoma cell (Goding, Monoclonal Antibodies: Principles and Practice, Academic Press, (1986) pp. 59-103). Immortalized cell lines are usually transformed mammalian cells, particularly myeloma cells of rodent, bovine and human origin. Usually, rat or mouse myeloma cell lines are employed. The hybridoma cells may be cultured in a suitable culture medium that preferably contains one or more substances that inhibit the growth or survival of the unfused, immortalized cells. For example, if the parental cells lack the enzyme hypoxanthine guanine phosphoribosyl transferase (HGPRT or HPRT), the culture medium for the hybridomas typically will include hypoxanthine, aminopterin, and thymidine (“HAT medium”), which substances prevent the growth of HGPRT-deficient cells.

[0154] Monoclonal antibody technology is used in implementing research, diagnosis and therapy. Monoclonal antibodies are used in radioimmunoassays, enzyme-linked immunosorbent assays, immunocytopathology, and flow cytometry for in vitro diagnosis, and in vivo for diagnosis and immunotherapy of human disease. Waldmann, T. A. (1991) Science 252:1657-1662. In particular, monoclonal antibodies have been widely applied to the diagnosis and therapy of cancer, wherein it is desirable to target malignant lesions while avoiding normal tissue. See, e.g., U.S. Pat. Nos. 4,753,894 to Frankel, et al.; 4,938,948 to Ring et al.; and 4,956,453 to Bjorn et al.

[0155] In one embodiment, the antibodies are bispecific antibodies. Bispecific antibodies are monoclonal, preferably human or humanized, antibodies that have binding specificities for at least two different antigens. A number of “humanized” antibody molecules comprising an antigen-binding site derived from a non-human immunoglobulin have been described, including chimeric antibodies having rodent V regions and their associated CDRs fused to human constant domains (Winter et al. (1991) Nature 349:293-299; Lobuglio et al. (1989) Proc. Nat. Acad. Sci. USA 86:4220-4224; Shaw et al. (1987) J Immunol. 138:4534-4538; and Brown et al. (1987) Cancer Res. 47:3577-3583), rodent CDRs grafted into a human supporting FR prior to fusion with an appropriate human antibody constant domain (Riechmann et al. (1988) Nature 332:323-327; Verhoeyen et al. (1988) Science 239:1534-1536; and Jones et al. (1986) Nature 321:522-525), and rodent CDRs supported by recombinantly veneered rodent FRs (European Patent Publication No. 519,596, published Dec. 23, 1992). These “humanized” molecules are designed to minimize unwanted immunological response toward rodent antihuman antibody molecules which limits the duration and effectiveness of therapeutic applications of those moieties in human recipients. In the present case, one of the binding specificities is for a protein encoded by a nucleic acid of Tables 1-15, or a fragment thereof, the other one is for any other antigen, and preferably for a cell-surface protein or receptor or receptor subunit, preferably one that is tumor specific.

[0156] In a preferred embodiment, the antibodies to CA are capable of reducing or eliminating the biological function of CA, as is described below. That is, the addition of anti-CA antibodies (either polyclonal or preferably monoclonal) to CA (or cells containing CA) may reduce or eliminate the CA activity. Generally, at least a 25% decrease in activity is preferred, with at least about 50% being particularly preferred and about a 95-100% decrease being especially preferred.

[0157] In a preferred embodiment the antibodies to the CA proteins are humanized antibodies. “Humanized” antibodies refer to a molecule having an antigen binding site that is substantially derived from an immunoglobulin from a non-human species and the remaining immunoglobulin structure of the molecule based upon the structure and/or sequence of a human immunoglobulin. The antigen binding site may comprise either complete variable domains fused onto constant domains or only the complementarity determining regions (CDRs) grafted onto appropriate framework regions in the variable domains. Antigen binding sites may be wild type or modified by one or more amino acid substitutions, e.g., modified to resemble human immunoglobulin more closely. Alternatively, a humanized antibody may be derived from a chimeric antibody that retains or substantially retains the antigen-binding properties of the parental, non-human, antibody but which exhibits diminished immunogenicity as compared to the parental antibody when administered to humans. The phrase “chimeric antibody,” as used herein, refers to an antibody containing sequence derived from two different antibodies (see, e.g., U.S. Pat. No. 4,816,567) that typically originate from different species. Typically, in these chimeric antibodies, the variable region of both light and heavy chains mimics the variable regions of antibodies derived from one species of mammals, while the constant portions are homologous to the sequences in antibodies derived from another. Most typically, chimeric antibodies comprise human and murine antibody fragments, generally human constant and mouse variable regions. Humanized antibodies include human immunoglobulins (recipient antibody) in which residues form a complementary determining region (CDR) of the recipient are replaced by residues from a CDR of a non-human species (donor antibody) such as mouse, rat or rabbit having the desired specificity, affinity and capacity. In some instances, Fv framework residues of the human immunoglobulin are replaced by corresponding non-human residues. Humanized antibodies may also comprise residues that are found neither in the recipient antibody nor in the imported CDR or framework sequences. In general, the humanized antibody will comprise substantially all of at least one, and typically two, variable domains, in which all or substantially all of the CDR regions correspond to those of a non-human immunoglobulin and all or substantially all of the framework residues (FR) regions are those of a human immunoglobulin consensus sequence. The humanized antibody optimally also will comprise at least a portion of an immunoglobulin constant region (Fc), typically that of a human immunoglobulin (Jones et al., Nature, 321:522-525 (1986); Riechmann et al., Nature, 332:323-329 (1988); and Presta, Curr. Op. Struct. Biol., 2:593-596 (1992)). One clear advantage to such chimeric forms is that, for example, the variable regions can conveniently be derived from presently known sources using readily available hybridomas or B cells from non human host organisms in combination with constant regions derived from, for example, human cell preparations. While the variable region has the advantage of ease of preparation, and the specificity is not affected by its source, the constant region being human, is less likely to elicit an immune response from a human subject when the antibodies are injected than would the constant region from a non-human source. However, the definition is not limited to this particular example.

[0158] Because humanized antibodies are far less immunogenic in humans than the parental mouse monoclonal antibodies, they can be used for the treatment of humans with far less risk of anaphylaxis. Thus, these antibodies may be preferred in therapeutic applications that involve in vivo administration to a human such as, e.g., use as radiation sensitizers for the treatment of neoplastic disease or use in methods to reduce the side effects of, e.g., cancer therapy. Methods for humanizing non-human antibodies are well known in the art. Generally, a humanized antibody has one or more amino acid residues introduced into it from a source that is non-human. These non-human amino acid residues are often referred to as import residues, which are typically taken from an import variable domain. Humanization can be essentially performed following the method of Winter and co-workers (Jones et al., Nature 321:522-525 (1986); Riechmann et al., Nature 332:323-327 (1988); Verhoeyen et al., Science 239:1534-1536 (1988)), by substituting rodent CDRs or CDR sequences for the corresponding sequences of a human antibody. Accordingly, such humanized antibodies are chimeric antibodies (U.S. Pat. No. 4,816,567), wherein substantially less than an intact human variable domain has been substituted by the corresponding sequence from a non-human species. In practice, humanized antibodies are typically human antibodies in which some CDR residues and possibly some FR residues are substituted by residues from analogous sites in rodent antibodies.

[0159] Human antibodies can also be produced using various techniques known in the art, including phage display libraries [Hoogenboom and Winter, J. Mol. Biol., 227:381 (1991); Marks et al., J. Mol. Biol., 222:581 (1991)]. The techniques of Cole et al. and Boerner et al. are also available for the preparation of human monoclonal antibodies [Cole et al., Monoclonal Antibodies and Cancer Therapy, Alan R. Liss, p. 77 (1985) and Boerner et al., J. Immunol., 147(1):86-95 (1991)]. Humanized antibodies may be achieved by a variety of methods including, for example: (1) grafting the non-human complementarity determining regions (CDRs) onto a human framework and constant region (a process referred to in the art as “humanizing”), or, alternatively, (2) transplanting the entire non-human variable domains, but “cloaking” them with a human-like surface by replacement of surface residues (a process referred to in the art as “veneering”). In the present invention, humanized antibodies will include both “humanized” and “veneered” antibodies. Similarly, human antibodies can be made by introducing human immunoglobulin loci into transgenic animals, e.g., mice in which the endogenous immunoglobulin genes have been partially or completely inactivated. Upon challenge, human antibody production is observed, which closely resembles that seen in humans in all respects, including gene rearrangement, assembly, and antibody repertoire. This approach is described, for example, in U.S. Pat. Nos. 5,545,807; 5,545,806; 5,569,825; 5,625,126; 5,633,425; 5,661,016, and in the following scientific publications: Marks et al., Bio/Technology 10, 779-783 (1992); Lonberg et al., Nature 368 856-859 (1994); Morrison, Nature 368, 812-13 (1994); Fishwild et al., Nature Biotechnology 14, 845-51 (1996); Neuberger, Nature Biotechnology 14, 826 (1996); Lonberg and Huszar, Intern. Rev. Immunol. 13 65-93 (1995); Jones et al., Nature 321:522-525 (1986); Morrison et al., Proc. Natl. Acad. Sci, U.S.A., 81:6851-6855 (1984); Morrison and Oi, Adv. Immunol., 44:65-92 (1988); Verhoeyer et al., Science 239:1534-1536 (1988); Padlan, Molec. Immun. 28:489-498 (1991); Padlan, Molec. Immunol. 31(3):169-217 (1994); and Kettleborough, C. A. et al., Protein Eng. 4(7):773-83 (1991) each of which is incorporated herein by reference.

[0160] The phrase “complementarity determining region” refers to amino acid sequences which together define the binding affinity and specificity of the natural Fv region of a native immunoglobulin binding site. See, e.g., Chothia et al., J. Mol. Biol. 196:901-917 (1987); Kabat et al., U.S. Dept. of Health and Human Services NIH Publication No. 91-3242 (1991). The phrase “constant region” refers to the portion of the antibody molecule that confers effector functions. In the present invention, mouse constant regions are substituted by human constant regions. The constant regions of the subject humanized antibodies are derived from human immunoglobulins. The heavy chain constant region can be selected from any of the five isotypes: alpha, delta, epsilon, gamma or mu. One method of humanizing antibodies comprises aligning the non-human heavy and light chain sequences to human heavy and light chain sequences, selecting and replacing the non-human framework with a human framework based on such alignment, molecular modeling to predict the conformation of the humanized sequence and comparing to the conformation of the parent antibody. This process is followed by repeated back mutation of residues in the CDR region that disturb the structure of the CDRs until the predicted conformation of the humanized sequence model closely approximates the conformation of the non-human CDRs of the parent non-human antibody. Such humanized antibodies may be further derivatized to facilitate uptake and clearance, e.g, via Ashwell receptors. See, e.g., U.S. Pat. Nos. 5,530,101 and 5,585,089 which are incorporated herein by reference.

[0161] Humanized antibodies to CA polypeptides can also be produced using transgenic animals that are engineered to contain human immunoglobulin loci. For example, WO 98/24893 discloses transgenic animals having a human Ig locus wherein the animals do not produce functional endogenous immunoglobulins due to the inactivation of endogenous heavy and light chain loci. WO 91/10741 also discloses transgenic non-primate mammalian hosts capable of mounting an immune response to an immunogen, wherein the antibodies have primate constant and/or variable regions, and wherein the endogenous immunoglobulin-encoding loci are substituted or inactivated. WO 96/30498 discloses the use of the Cre/Lox system to modify the immunoglobulin locus in a mammal, such as to replace all or a portion of the constant or variable region to form a modified antibody molecule. WO 94/02602 discloses non-human mammalian hosts having inactivated endogenous Ig loci and functional human Ig loci. U.S. Pat. No. 5,939,598 discloses methods of making transgenic mice in which the mice lack endogenous heavy chains, and express an exogenous immunoglobulin locus comprising one or more xenogeneic constant regions.

[0162] Using a transgenic animal described above, an immune response can be produced to a selected antigenic molecule, and antibody-producing cells can be removed from the animal and used to produce hybridomas that secrete human monoclonal antibodies. Immunization protocols, adjuvants, and the like are known in the art, and are used in immunization of, for example, a transgenic mouse as described in WO 96/33735. The monoclonal antibodies can be tested for the ability to inhibit or neutralize the biological activity or physiological effect of the corresponding protein.

[0163] In the present invention, CA polypeptides of the invention and variants thereof are used to immunize a transgenic animal as described above. Monoclonal antibodies are made using methods known in the art, and the specificity of the antibodies is tested using isolated CA polypeptides. Methods for preparation of the human or primate CA or an epitope thereof include, but are not limited to chemical synthesis, recombinant DNA techniques or isolation from biological samples. Chemical synthesis of a peptide can be performed, for example, by the classical Merrifeld method of solid phase peptide synthesis (Merrifeld, J. Am. Chem. Soc. 85:2149, 1963 which is incorporated by reference) or the FMOC strategy on a Rapid Automated Multiple Peptide Synthesis system (E. I. du Pont de Nemours Company, Wilmington, Del.) (Caprino and Han, J. Org. Chem. 37:3404, 1972 which is incorporated by reference).

[0164] Polyclonal antibodies can be prepared by immunizing rabbits or other animals by injecting antigen followed by subsequent boosts at appropriate intervals. The animals are bled and sera assayed against purified CA proteins usually by ELISA or by bioassay based upon the ability to block the action of CA proteins. When using avian species, e.g., chicken, turkey and the like, the antibody can be isolated from the yolk of the egg. Monoclonal antibodies can be prepared after the method of Milstein and Kohler by fusing splenocytes from immunized mice with continuously replicating tumor cells such as myeloma or lymphoma cells. (Milstein and Kohler, Nature 256:495-497, 1975; Gulfre and Milstein, Methods in Enzymology: Immunochemical Techniques 73:1-46, Langone and Banatis eds., Academic Press, 1981 which are incorporated by reference). The hybridoma cells so formed are then cloned by limiting dilution methods and supernates assayed for antibody production by ELISA, RIA or bioassay.

[0165] The unique ability of antibodies to recognize and specifically bind to target proteins provides an approach for treating an overexpression of the protein. Thus, another aspect of the present invention provides for a method for preventing or treating diseases involving overexpression of a CA polypeptide by treatment of a patient with specific antibodies to the CA protein.

[0166] Specific antibodies, either polyclonal or monoclonal, to the CA proteins can be produced by any suitable method known in the art as discussed above. For example, murine or human monoclonal antibodies can be produced by hybridoma technology or, alternatively, the CA proteins, or an immunologically active fragment thereof, or an anti-idiotypic antibody, or fragment thereof can be administered to an animal to elicit the production of antibodies capable of recognizing and binding to the CA proteins. Such antibodies can be from any class of antibodies including, but not limited to IgG, IgA, IgM, IgD, and IgE or in the case of avian species, IgY and from any subclass of antibodies.

[0167] By immunotherapy is meant treatment of a cancer with an antibody raised against a CA protein. As used herein, immunotherapy can be passive or active. Passive immunotherapy as defined herein is the passive transfer of antibody to a recipient (patient). Active immunization is the induction of antibody and/or T-cell responses in a recipient (patient). Induction of an immune response is the result of providing the recipient with an antigen to which antibodies are raised. As appreciated by one of ordinary skill in the art, the antigen may be provided by injecting a polypeptide against which antibodies are desired to be raised into a recipient, or contacting the recipient with a nucleic acid capable of expressing the antigen and under conditions for expression of the antigen.

[0168] In a preferred embodiment, oncogenes which encode secreted growth factors may be inhibited by raising antibodies against CA proteins that are secreted proteins as described above. Without being bound by theory, antibodies used for treatment, bind and prevent the secreted protein from binding to its receptor, thereby inactivating the secreted CA protein.

[0169] In another preferred embodiment, the CA protein to which antibodies are raised is a transmembrane protein. Without being bound by theory, antibodies used for treatment, bind the extracellular domain of the CA protein and prevent it from binding to other proteins, such as circulating ligands or cell-associated molecules. The antibody may cause down-regulation of the transmembrane CA protein. As will be appreciated by one of ordinary skill in the art, the antibody may be a competitive, non-competitive or uncompetitive inhibitor of protein binding to the extracellular domain of the CA protein. The antibody is also an antagonist of the CA protein. Further, the antibody prevents activation of the transmembrane CA protein. In one aspect, when the antibody prevents the binding of other molecules to the CA protein, the antibody prevents growth of the cell. The antibody may also sensitize the cell to cytotoxic agents, including, but not limited to TNF-α, TNF-β, IL-1, INF-γ and IL-2, or chemotherapeutic agents including 5FU, vinblastine, actinomycin D, cisplatin, methotrexate, and the like. In some instances the antibody belongs to a sub-type that activates serum complement when complexed with the transmembrane protein thereby mediating cytotoxicity. Thus, cancers may be treated by administering to a patient antibodies directed against the transmembrane CA protein.

[0170] In another preferred embodiment, the antibody is conjugated to a therapeutic moiety. In one aspect the therapeutic moiety is a small molecule that modulates the activity of the CA protein. In another aspect the therapeutic moiety modulates the activity of molecules associated with or in close proximity to the CA protein. The therapeutic moiety may inhibit enzymatic activity such as protease or protein kinase activity associated with cancer.

[0171] In a preferred embodiment, the therapeutic moiety may also be a cytotoxic agent. In this method, radioisotopes, natural toxins, chemotherapy agents, or other substances (such as biological response modifiers) are chemically linked or conjugated to a monoclonal antibody to form “immunoconjugates” and “immunotoxins” which target the cytotoxic agent to tumor tissue or cells resulting in a reduction in the number of afflicted cells, thereby reducing symptoms associated with cancers, including lymphoma. Cytotoxic agents are numerous and varied and include, but are not limited to, cytotoxic drugs or toxins or active fragments of such toxins. Suitable toxins and their corresponding fragments include diphtheria A chain, exotoxin A chain, ricin A chain, abrin A chain, curcin, crotin, phenomycin, enomycin and the like. Cytotoxic agents also include radiochemicals made by conjugating radioisotopes to antibodies raised against CA proteins, or binding of a radionuclide to a chelating agent that has been covalently attached to the antibody. Targeting the therapeutic moiety to transmembrane CA proteins not only serves to increase the local concentration of therapeutic moiety in the cancer of interest, i.e., lymphoma, but also serves to reduce deleterious side effects that may be associated with the therapeutic moiety. A number of investigators have used monoclonal antibodies as carriers of cytotoxic substances in attempts to selectively direct those agents to malignant tissue. More particularly, a number of monoclonal antibodies have been conjugated to toxins such as ricin, abrin, diphtheria toxin and Pseudomonas exotoxin or to enzymatically active portions (A chains) thereof via heterobifunctional agents. See, e.g., U.S. Pat. No. 4,753,894 to Frankel et al.; Nevelle, et al. (1982) Immunol Rev 62:75-91; Ross et al. (1980) Eur. J. Biochem 104; Vitteta et al. (1982) Immunol Rev 62:158-183; Raso et al. (1982) Cancer Res 42:457-464, and Trowbridge et al. (1981) Nature 294:171-173.

[0172] In another preferred embodiment, the CA protein against which the antibodies are raised is an intracellular protein. In this case, the antibody may be conjugated to a protein that facilitates entry into the cell. In one case, the antibody enters the cell by endocytosis. In another embodiment, a nucleic acid encoding the antibody is administered to the individual or cell. Moreover, wherein the CA protein can be targeted within a cell, e.g., the nucleus, an antibody thereto contains a signal for that target localization, e.g., a nuclear localization signal.

[0173] The CA antibodies of the invention specifically bind to CA proteins. By “specifically bind” herein is meant that the antibodies bind to the protein with a binding constant in the range of 10⁴-10⁻⁶ M⁻¹, with a preferred range being 10⁻⁷-10⁻⁹ M⁻¹.

[0174] In a preferred embodiment, the CA protein is purified or isolated after expression. CA proteins may be isolated or purified in a variety of ways known to those skilled in the art depending on what other components are present in the sample. Standard purification methods include electrophoretic, molecular, immunological and chromatographic techniques, including ion exchange, hydrophobic, affinity, and reverse-phase HPLC chromatography, and chromatofocusing. For example, the CA protein may be purified using a standard anti-CA antibody column. Ultrafiltration and diafiltration techniques, in conjunction with protein concentration, are also useful. For general guidance in suitable purification techniques, see Scopes, R., Protein Purification, Springer-Verlag, N.Y. (1982). The degree of purification necessary will vary depending on the use of the CA protein. In some instances no purification will be necessary.

Detection of Cancer Phenotype

[0175] Once expressed and purified if necessary, the CA proteins and nucleic acids are useful in a number of applications. In one aspect, the expression levels of genes are determined for different cellular states in the cancer phenotype; that is, the expression levels of genes in normal tissue and in cancer tissue (and in some cases, for varying severities of lymphoma that relate to prognosis, as outlined below) are evaluated to provide expression profiles. An expression profile of a particular cell state or point of development is essentially a “fingerprint” of the state; while two states may have any particular gene similarly expressed, the evaluation of a number of genes simultaneously allows the generation of a gene expression profile that is unique to the state of the cell. By comparing expression profiles of cells in different states, information regarding which genes are important (including both up- and down-regulation of genes) in each of these states is obtained. Then, diagnosis may be done or confirmed: does tissue from a particular patient have the gene expression profile of normal or cancer tissue.

[0176] “Differential expression,” or equivalents used herein, refers to both qualitative as well as quantitative differences in the temporal and/or cellular expression patterns of genes, within and among the cells. Thus, a differentially expressed gene can qualitatively have its expression altered, including an activation or inactivation, in, for example, normal versus cancer tissue. That is, genes may be turned on or turned off in a particular state, relative to another state. As is apparent to the skilled artisan, any comparison of two or more states can be made. Such a qualitatively regulated gene will exhibit an expression pattern within a state or cell type which is detectable by standard techniques in one such state or cell type, but is not detectable in both. Alternatively, the determination is quantitative in that expression is increased or decreased; that is, the expression of the gene is either up-regulated, resulting in an increased amount of transcript, or down-regulated, resulting in a decreased amount of transcript. The degree to which expression differs need only be large enough to quantify via standard characterization techniques as outlined below, such as by use of Affymetrix GeneChip® expression arrays, Lockhart, Nature Biotechnology, 14:1675-1680 (1996), hereby expressly incorporated by reference. Other techniques include, but are not limited to, quantitative reverse transcriptase PCR, Northern analysis and RNase protection. As outlined above, preferably the change in expression (i.e. upregulation or downregulation) is at least about 50%, more preferably at least about 100%, more preferably at least about 150%, more preferably, at least about 200%, with from 300 to at least 1000% being especially preferred.

[0177] As will be appreciated by those in the art, this may be done by evaluation at either the gene transcript, or the protein level; that is, the amount of gene expression may be monitored using nucleic acid probes to the DNA or RNA equivalent of the gene transcript, and the quantification of gene expression levels, or, alternatively, the final gene product itself (protein) can be monitored, for example through the use of antibodies to the CA protein and standard immunoassays (ELISAs, etc.) or other techniques, including mass spectroscopy assays, 2D gel electrophoresis assays, etc. Thus, the proteins corresponding to CA genes, i.e. those identified as being important in a particular cancer phenotype, i.e., lymphoma, can be evaluated in a diagnostic test specific for that cancer.

[0178] In a preferred embodiment, gene expression monitoring is done and a number of genes, i.e. an expression profile, is monitored simultaneously, although multiple protein expression monitoring can be done as well. Similarly, these assays may be done on an individual basis as well.

[0179] In this embodiment, the CA nucleic acid probes may be attached to biochips as outlined herein for the detection and quantification of CA sequences in a particular cell. The assays are done as is known in the art. As will be appreciated by those in the art, any number of different CA sequences may be used as probes, with single sequence assays being used in some cases, and a plurality of the sequences described herein being used in other embodiments. In addition, while solid-phase assays are described, any number of solution based assays may be done as well.

[0180] In a preferred embodiment, both solid and solution based assays may be used to detect CA sequences that are up-regulated or down-regulated in cancers as compared to normal tissue. In instances where the CA sequence has been altered but shows the same expression profile or an altered expression profile, the protein will be detected as outlined herein.

[0181] In a preferred embodiment nucleic acids encoding the CA protein are detected. Although DNA or RNA encoding the CA protein may be detected, of particular interest are methods wherein the mRNA encoding a CA protein is detected. The presence of mRNA in a sample is an indication that the CA gene has been transcribed to form the mRNA, and suggests that the protein is expressed. Probes to detect the mRNA can be any nucleotide/deoxynucleotide probe that is complementary to and base pairs with the mRNA and includes but is not limited to oligonucleotides, cDNA or RNA. Probes also should contain a detectable label, as defined herein. In one method the mRNA is detected after immobilizing the nucleic acid to be examined on a solid support such as nylon membranes and hybridizing the probe with the sample. Following washing to remove the non-specifically bound probe, the label is detected. In another method detection of the mRNA is performed in situ. In this method permeabilized cells or tissue samples are contacted with a detectably labeled nucleic acid probe for sufficient time to allow the probe to hybridize with the target mRNA. Following washing to remove the non-specifically bound probe, the label is detected. For example a digoxygenin labeled riboprobe (RNA probe) that is complementary to the mRNA encoding a CA protein is detected by binding the digoxygenin with an anti-digoxygenin secondary antibody and developed with nitro blue tetrazolium and 5-bromo-4-chloro-3-indoyl phosphate.

[0182] In a preferred embodiment, any of the three classes of proteins as described herein (secreted, transmembrane or intracellular proteins) are used in diagnostic assays. The CA proteins, antibodies, nucleic acids, modified proteins and cells containing CA sequences are used in diagnostic assays. This can be done on an individual gene or corresponding polypeptide level, or as sets of assays.

[0183] As described and defined herein, CA proteins find use as markers of cancers; including lymphomas such as, but not limited to, Hodgkin's and non-Hodgkin's lymphoma. Detection of these proteins in putative cancer tissue or patients allows for a determination or diagnosis of the type of cancer. Numerous methods known to those of ordinary skill in the art find use in detecting cancers. In one embodiment, antibodies are used to detect CA proteins. A preferred method separates proteins from a sample or patient by electrophoresis on a gel (typically a denaturing and reducing protein gel, but may be any other type of gel including isoelectric focusing gels and the like). Following separation of proteins, the CA protein is detected by immunoblotting with antibodies raised against the CA protein. Methods of immunoblotting are well known to those of ordinary skill in the art.

[0184] In another preferred method, antibodies to the CA protein find use in in situ imaging techniques. In this method cells are contacted with from one to many antibodies to the CA protein(s). Following washing to remove non-specific antibody binding, the presence of the antibody or antibodies is detected. In one embodiment the antibody is detected by incubating with a secondary antibody that contains a detectable label. In another method the primary antibody to the CA protein(s) contains a detectable label. In another preferred embodiment each one of multiple primary antibodies contains a distinct and detectable label. This method finds particular use in simultaneous screening for a plurality of CA proteins. As will be appreciated by one of ordinary skill in the art, numerous other histological imaging techniques are useful in the invention.

[0185] In a preferred embodiment the label is detected in a fluorometer that has the ability to detect and distinguish emissions of different wavelengths. In addition, a fluorescence activated cell sorter (FACS) can be used in the method.

[0186] In another preferred embodiment, antibodies find use in diagnosing cancers from blood samples. As previously described, certain CA proteins are secreted/circulating molecules. Blood samples, therefore, are useful as samples to be probed or tested for the presence of secreted CA proteins. Antibodies can be used to detect the CA proteins by any of the previously described immunoassay techniques including ELISA, immunoblotting (Western blotting), immunoprecipitation, BIACORE technology and the like, as will be appreciated by one of ordinary skill in the art.

[0187] In a preferred embodiment, in situ hybridization of labeled CA nucleic acid probes to tissue arrays is done. For example, arrays of tissue samples, including CA tissue and/or normal tissue, are made. In situ hybridization as is known in the art can then be done.

[0188] It is understood that when comparing the expression fingerprints between an individual and a standard, the skilled artisan can make a diagnosis as well as a prognosis. It is further understood that the genes that indicate diagnosis may differ from those that indicate prognosis.

[0189] In a preferred embodiment, the CA proteins, antibodies, nucleic acids, modified proteins and cells containing CA sequences are used in prognosis assays. As above, gene expression profiles can be generated that correlate to cancer, especially lymphoma, severity, in terms of long term prognosis. Again, this may be done on either a protein or gene level, with the use of genes being preferred. As above, the CA probes are attached to biochips for the detection and quantification of CA sequences in a tissue or patient. The assays proceed as outlined for diagnosis.

Screening for CA-Targeted Drugs

[0190] In one embodiment, any of the CA sequences as described herein are used in drug screening assays. The CA proteins, antibodies, nucleic acids, modified proteins and cells containing CA sequences are used in drug screening assays or by evaluating the effect of drug candidates on a “gene expression profile” or expression profile of polypeptides. In one embodiment, the expression profiles are used, preferably in conjunction with high throughput screening techniques to allow monitoring for expression profile genes after treatment with a candidate agent, Zlokarnik, et al., Science 279, 84-8 (1998), Heid, et al., Genome Res., 6:986-994 (1996).

[0191] In another embodiment, the CA proteins, antibodies, nucleic acids, modified proteins and cells containing the native or modified CA proteins are used in screening assays. That is, the present invention provides novel methods for screening for compositions that modulate the cancer phenotype. As above, this can be done by screening for modulators of gene expression or for modulators of protein activity. Similarly, this may be done on an individual gene or protein level or by evaluating the effect of drug candidates on a “gene expression profile”. In a preferred embodiment, the expression profiles are used, preferably in conjunction with high throughput screening techniques to allow monitoring for expression profile genes after treatment with a candidate agent, see Zlokarnik, supra.

[0192] Having identified the CA genes herein, a variety of assays to evaluate the effects of agents on gene expression may be executed. In a preferred embodiment, assays may be run on an individual gene or protein level. That is, having identified a particular gene as aberrantly regulated in cancer, candidate bioactive agents may be screened to modulate the gene's regulation. “Modulation” thus includes both an increase and a decrease in gene expression or activity. The preferred amount of modulation will depend on the original change of the gene expression in normal versus tumor tissue, with changes of at least 10%, preferably 50%, more preferably 100-300%, and in some embodiments 300-1000% or greater. Thus, if a gene exhibits a 4 fold increase in tumor compared to normal tissue, a decrease of about four fold is desired; a 10 fold decrease in tumor compared to normal tissue gives a 10 fold increase in expression for a candidate agent is desired, etc. Alternatively, where the CA sequence has been altered but shows the same expression profile or an altered expression profile, the protein will be detected as outlined herein.

[0193] As will be appreciated by those in the art, this may be done by evaluation at either the gene or the protein level; that is, the amount of gene expression may be monitored using nucleic acid probes and the quantification of gene expression levels, or, alternatively, the level of the gene product itself can be monitored, for example through the use of antibodies to the CA protein and standard immunoassays. Alternatively, binding and bioactivity assays with the protein may be done as outlined below.

[0194] In a preferred embodiment, gene expression monitoring is done and a number of genes, i.e. an expression profile, is monitored simultaneously, although multiple protein expression monitoring can be done as well.

[0195] In this embodiment, the CA nucleic acid probes are attached to biochips as outlined herein for the detection and quantification of CA sequences in a particular cell. The assays are further described below.

[0196] Generally, in a preferred embodiment, a candidate bioactive agent is added to the cells prior to analysis. Moreover, screens are provided to identify a candidate bioactive agent that modulates a particular type of cancer, modulates CA proteins, binds to a CA protein, or interferes between the binding of a CA protein and an antibody.

[0197] The term “candidate bioactive agent” or “drug candidate” or grammatical equivalents as used herein describes any molecule, e.g., protein, oligopeptide, small organic or inorganic molecule, polysaccharide, polynucleotide, etc., to be tested for bioactive agents that are capable of directly or indirectly altering either the cancer phenotype, binding to and/or modulating the bioactivity of a CA protein, or the expression of a CA sequence, including both nucleic acid sequences and protein sequences. In a particularly preferred embodiment, the candidate agent suppresses a CA phenotype, for example to a normal tissue fingerprint. Similarly, the candidate agent preferably suppresses a severe CA phenotype. Generally a plurality of assay mixtures are run in parallel with different agent concentrations to obtain a differential response to the various concentrations. Typically, one of these concentrations serves as a negative control, i.e., at zero concentration or below the level of detection.

[0198] In one aspect, a candidate agent will neutralize the effect of a CA protein. By “neutralize” is meant that activity of a protein is either inhibited or counter acted against so as to have substantially no effect on a cell.

[0199] Candidate agents encompass numerous chemical classes, though typically they are organic or inorganic molecules, preferably small organic compounds having a molecular weight of more than 100 and less than about 2,500 Daltons. Preferred small molecules are less than 2000, or less than 1500 or less than 1000 or less than 500 D. Candidate agents comprise functional groups necessary for structural interaction with proteins, particularly hydrogen bonding, and typically include at least an amine, carbonyl, hydroxyl or carboxyl group, preferably at least two of the functional chemical groups. The candidate agents often comprise cyclical carbon or heterocyclic structures and/or aromatic or polyaromatic structures substituted with one or more of the above functional groups. Candidate agents are also found among biomolecules including peptides, saccharides, fatty acids, steroids, purines, pyrimidines, derivatives, structural analogs or combinations thereof. Particularly preferred are peptides.

[0200] Candidate agents are obtained from a wide variety of sources including libraries of synthetic or natural compounds. For example, numerous means are available for random and directed synthesis of a wide variety of organic compounds and biomolecules, including expression of randomized oligonucleotides. Alternatively, libraries of natural compounds in the form of bacterial, fungal, plant and animal extracts are available or readily produced. Additionally, natural or synthetically produced libraries and compounds are readily modified through conventional chemical, physical and biochemical means. Known pharmacological agents may be subjected to directed or random chemical modifications, such as acylation, alkylation, esterification, or amidification to produce structural analogs.

[0201] In one embodiment, the candidate bioactive agents are proteins. By “protein” herein is meant at least two covalently attached amino acids, which includes proteins, polypeptides, oligopeptides and peptides. The protein may be made up of naturally occurring amino acids and peptide bonds, or synthetic peptidomimetic structures. Thus “amino acid”, or “peptide residue”, as used herein means both naturally occurring and synthetic amino acids. For example, homo-phenylalanine, citrulline and norleucine are considered amino acids for the purposes of the invention. “Amino acid” also includes imino acid residues such as proline and hydroxyproline. The side chains may be in either the (R) or the (S) configuration. In the preferred embodiment, the amino acids are in the (S) or L-configuration. If non-naturally occurring side chains are used, non-amino acid substituents may be used, for example to prevent or retard in vivo degradations.

[0202] In a preferred embodiment, the candidate bioactive agents are naturally occurring proteins or fragments of naturally occurring proteins. Thus, for example, cellular extracts containing proteins, or random or directed digests of proteinaceous cellular extracts, may be used. In this way libraries of prokaryotic and eukaryotic proteins may be made for screening in the methods of the invention. Particularly preferred in this embodiment are libraries of bacterial, fungal, viral, and mammalian proteins, with the latter being preferred, and human proteins being especially preferred.

[0203] In another preferred embodiment, the candidate bioactive agents are peptides of from about 5 to about 30 amino acids, with from about 5 to about 20 amino acids being preferred, and from about 7 to about 15 being particularly preferred. The peptides may be digests of naturally occurring proteins as is outlined above, random peptides, or “biased” random peptides. By “randomized” or grammatical equivalents herein is meant that each nucleic acid and peptide consists of essentially random nucleotides and amino acids, respectively. Since generally these random peptides (or nucleic acids, discussed below) are chemically synthesized, they may incorporate any nucleotide or amino acid at any position. The synthetic process can be designed to generate randomized proteins or nucleic acids, to allow the formation of all or most of the possible combinations over the length of the sequence, thus forming a library of randomized candidate bioactive proteinaceous agents.

[0204] In one embodiment, the library is fully randomized, with no sequence preferences or constants at any position. In a preferred embodiment, the library is biased. That is, some positions within the sequence are either held constant, or are selected from a limited number of possibilities. For example, in a preferred embodiment, the nucleotides or amino acid residues are randomized within a defined class, for example, of hydrophobic amino acids, hydrophilic residues, sterically biased (either small or large) residues, towards the creation of nucleic acid binding domains, the creation of cysteines, for cross-linking, prolines for SH-3 domains, serines, threonines, tyrosines or histidines for phosphorylation sites, etc., or to purines, etc.

[0205] In one embodiment, the candidate bioactive agents are nucleic acids. As described generally for proteins, nucleic acid candidate bioactive agents may be naturally occurring nucleic acids, random nucleic acids, or “biased” random nucleic acids. In another embodiment, the candidate bioactive agents are organic chemical moieties, a wide variety of which are available in the literature.

[0206] In assays for testing alteration of the expression profile of one or more CA genes, after the candidate agent has been added and the cells allowed to incubate for some period of time, a nucleic acid sample containing the target sequences to be analyzed is prepared. The target sequence is prepared using known techniques (e.g., converted from RNA to labeled cDNA, as described above) and added to a suitable microarray. For example, an in vitro reverse transcription with labels covalently attached to the nucleosides is performed. Generally, the nucleic acids are labeled with a label as defined herein, especially with biotin-FITC or PE, Cy3 and Cy5.

[0207] As will be appreciated by those in the art, these assays can be direct hybridization assays or can comprise “sandwich assays”, which include the use of multiple probes, as is generally outlined in U.S. Pat. Nos. 5,681,702, 5,597,909, 5,545,730, 5,594,117, 5,591,584, 5,571,670, 5,580,731, 5,571,670, 5,591,584, 5,624,802, 5,635,352, 5,594,118, 5,359,100, 5,124,246 and 5,681,697, all of which are hereby incorporated by reference. In this embodiment, in general, the target nucleic acid is prepared as outlined above, and then added to the biochip comprising a plurality of nucleic acid probes, under conditions that allow the formation of a hybridization complex.

[0208] A variety of hybridization conditions may be used in the present invention, including high, moderate and low stringency conditions as outlined above. The assays are generally run under stringency conditions that allow formation of the label probe hybridization complex only in the presence of target. Stringency can be controlled by altering a step parameter that is a thermodynamic variable, including, but not limited to, temperature, formamide concentration, salt concentration, chaotropic salt concentration, pH, organic solvent concentration, etc. These parameters may also be used to control non-specific binding, as is generally outlined in U.S. Pat. No. 5,681,697. Thus it may be desirable to perform certain steps at higher stringency conditions to reduce non-specific binding.

[0209] The reactions outlined herein may be accomplished in a variety of ways, as will be appreciated by those in the art. Components of the reaction may be added simultaneously, or sequentially, in any order, with preferred embodiments outlined below. In addition, the reaction may include a variety of other reagents in the assays. These include reagents like salts, buffers, neutral proteins, e.g. albumin, detergents, etc which may be used to facilitate optimal hybridization and detection, and/or reduce non-specific or background interactions. Also reagents that otherwise improve the efficiency of the assay, such as protease inhibitors, nuclease inhibitors, anti-microbial agents, etc., may be used, depending on the sample preparation methods and purity of the target. In addition, either solid phase or solution based (i.e., kinetic PCR) assays may be used.

[0210] Once the assay is run, the data are analyzed to determine the expression levels, and changes in expression levels as between states, of individual genes, forming a gene expression profile.

[0211] In a preferred embodiment, as for the diagnosis and prognosis applications, having identified the differentially expressed gene(s) or mutated gene(s) important in any one state, screens can be run to test for alteration of the expression of the CA genes individually. That is, screening for modulation of regulation of expression of a single gene can be done. Thus, for example, in the case of target genes whose presence or absence is unique between two states, screening is done for modulators of the target gene expression.

[0212] In addition, screens can be done for novel genes that are induced in response to a candidate agent. After identifying a candidate agent based upon its ability to suppress a CA expression pattern leading to a normal expression pattern, or modulate a single CA gene expression profile so as to mimic the expression of the gene from normal tissue, a screen as described above can be performed to identify genes that are specifically modulated in response to the agent. Comparing expression profiles between normal tissue and agent treated CA tissue reveals genes that are not expressed in normal tissue or CA tissue, but are expressed in agent treated tissue. These agent specific sequences can be identified and used by any of the methods described herein for CA genes or proteins. In particular these sequences and the proteins they encode find use in marking or identifying agent-treated cells. In addition, antibodies can be raised against the agent-induced proteins and used to target novel therapeutics to the treated CA tissue sample.

[0213] Thus, in one embodiment, a candidate agent is administered to a population of CA cells, that thus has an associated CA expression profile. By “administration” or “contacting” herein is meant that the candidate agent is added to the cells in such a manner as to allow the agent to act upon the cell, whether by uptake and intracellular action, or by action at the cell surface. In some embodiments, nucleic acid encoding a proteinaceous candidate agent (i.e. a peptide) may be put into a viral construct such as a retroviral construct and added to the cell, such that expression of the peptide agent is accomplished; see PCT US97/01019, hereby expressly incorporated by reference.

[0214] Once the candidate agent has been administered to the cells, the cells can be washed if desired and are allowed to incubate under preferably physiological conditions for some period of time. The cells are then harvested and a new gene expression profile is generated, as outlined herein.

[0215] Thus, for example, CA tissue may be screened for agents that reduce or suppress the CA phenotype. A change in at least one gene of the expression profile indicates that the agent has an effect on CA activity. By defining such a signature for the CA phenotype, screens for new drugs that alter the phenotype can be devised. With this approach, the drug target need not be known and need not be represented in the original expression screening platform, nor does the level of transcript for the target protein need to change.

[0216] In a preferred embodiment, as outlined above, screens may be done on individual genes and gene products (proteins). That is, having identified a particular differentially expressed gene as important in a particular state, screening of modulators of either the expression of the gene or the gene product itself can be done. The gene products of differentially expressed genes are sometimes referred to herein as “CA proteins” or “CAP”. The CAP may be a fragment, or alternatively, be the full-length protein to the fragment encoded by the nucleic acids of Tables 1-15 (human genomic sequences of SEQ ID NOS: 4, 16, 26, 34, 42, 54, 70, 80, 92, 108, 114, 120, 130, 142, and 148, and sequences of SEQ ID NOS: 5, 7, 9, 17, 19, 27, 29, 35, 37, 43, 45, 47, 49, 55, 57, 59, 61, 63, 71, 73, 75, 81, 83, 85, 87, 93, 109, 115, 121, 123, 125, 131, 135, 137, 143, 149, 151, 153, 155, 157, 159, 161, 163, 165, and 167 corresponding to the human mRNAs generated therefrom). In a preferred embodiment, the CAP is selected from the human protein sequences shown in Tables 1-15 (of SEQ ID NOS: 6, 8, 10, 18, 20, 28, 30, 36, 38, 44, 46, 48, 50, 56, 58, 60, 62, 64, 72, 74, 76, 82, 84, 86, 88, 94, 110, 116, 122, 124, 126, 132, 134, 136, 138, 144, 150, 152, 154, 156, 158, 160, 162, 164, 166, and 168). In another embodiment, the sequences are sequence variants as further described herein.

[0217] Preferably, the CAP is a fragment approximately 14 to 24 amino acids in length. More preferably the fragment is a soluble fragment. Preferably, the fragment includes a non-transmembrane region. In a preferred embodiment, the fragment has an N-terminal Cys to aid in solubility. In one embodiment, the C-terminus of the fragment is kept as a free acid and the N-terminus is a free amine to aid in coupling, e.g., to a cysteine.

[0218] In one embodiment the CA proteins are conjugated to an immunogenic agent as discussed herein. In one embodiment the CA protein is conjugated to BSA.

[0219] In a preferred embodiment, screening is done to alter the biological function of the expression product of the CA gene. Again, having identified the importance of a gene in a particular state, screening for agents that bind and/or modulate the biological activity of the gene product can be run as is more fully outlined below.

[0220] In a preferred embodiment, screens are designed to first find candidate agents that can bind to CA proteins, and then these agents may be used in assays that evaluate the ability of the candidate agent to modulate the CAP activity and the cancer phenotype. Thus, as will be appreciated by those in the art, there are a number of different assays that may be run; binding assays and activity assays.

[0221] In a preferred embodiment, binding assays are done. In general, purified or isolated gene product is used; that is, the gene products of one or more CA nucleic acids are made. In general, this is done as is known in the art. For example, antibodies are generated to the protein gene products, and standard immunoassays are run to determine the amount of protein present. Alternatively, cells comprising the CA proteins can be used in the assays.

[0222] Thus, in a preferred embodiment, the methods comprise combining a CA protein and a candidate bioactive agent, and determining the binding of the candidate agent to the CA protein. Preferred embodiments utilize the human or mouse CA protein, although other mammalian proteins may also be used, for example for the development of animal models of human disease. In some embodiments, as outlined herein, variant or derivative CA proteins may be used.

[0223] Generally, in a preferred embodiment of the methods herein, the CA protein or the candidate agent is non-diffusably bound to an insoluble support having isolated sample receiving areas (e.g. a microtiter plate, an array, etc.). The insoluble support may be made of any composition to which the compositions can be bound, is readily separated from soluble material, and is otherwise compatible with the overall method of screening. The surface of such supports may be solid or porous and of any convenient shape. Examples of suitable insoluble supports include microtiter plates, arrays, membranes and beads. These are typically made of glass, plastic (e.g., polystyrene), polysaccharides, nylon or nitrocellulose, Teflon®, etc. Microtiter plates and arrays are especially convenient because a large number of assays can be carried out simultaneously, using small amounts of reagents and samples.

[0224] The particular manner of binding of the composition is not crucial so long as it is compatible with the reagents and overall methods of the invention, maintains the activity of the composition and is nondiffusable. Preferred methods of binding include the use of antibodies (which do not sterically block either the ligand binding site or activation sequence when the protein is bound to the support), direct binding to “sticky” or ionic supports, chemical crosslinking, the synthesis of the protein or agent on the surface, etc. Following binding of the protein or agent, excess unbound material is removed by washing. The sample receiving areas may then be blocked through incubation with bovine serum albumin (BSA), casein or other innocuous protein or other moiety.

[0225] In a preferred embodiment, the CA protein is bound to the support, and a candidate bioactive agent is added to the assay. Alternatively, the candidate agent is bound to the support and the CA protein is added. Novel binding agents include specific antibodies, non-natural binding agents identified in screens of chemical libraries, peptide analogs, etc. Of particular interest are screening assays for agents that have a low toxicity for human cells. A wide variety of assays may be used for this purpose, including labeled in vitro protein-protein binding assays, electrophoretic mobility shift assays, immunoassays for protein binding, functional assays (phosphorylation assays, etc.) and the like.

[0226] The determination of the binding of the candidate bioactive agent to the CA protein may be done in a number of ways. In a preferred embodiment, the candidate bioactive agent is labeled, and binding determined directly. For example, this may be done by attaching all or a portion of the CA protein to a solid support, adding a labeled candidate agent (for example a fluorescent label), washing off excess reagent, and determining whether the label is present on the solid support. Various blocking and washing steps may be utilized as is known in the art.

[0227] By “labeled” herein is meant that the compound is either directly or indirectly labeled with a label which provides a detectable signal, e.g. radioisotope, fluorescers, enzyme, antibodies, particles such as magnetic particles, chemiluminescers, or specific binding molecules, etc. Specific binding molecules include pairs, such as biotin and streptavidin, digoxin and antidigoxin etc. For the specific binding members, the complementary member would normally be labeled with a molecule which provides for detection, in accordance with known procedures, as outlined above. The label can directly or indirectly provide a detectable signal.

[0228] In some embodiments, only one of the components is labeled. For example, the proteins (or proteinaceous candidate agents) may be labeled at tyrosine positions using ¹²⁵I, or with fluorophores. Alternatively, more than one component may be labeled with different labels; using ¹²⁵I for the proteins, for example, and a fluorophore for the candidate agents.

[0229] In a preferred embodiment, the binding of the candidate bioactive agent is determined through the use of competitive binding assays. In this embodiment, the competitor is a binding moiety known to bind to the target molecule (i.e. CA protein), such as an antibody, peptide, binding partner, ligand, etc. Under certain circumstances, there may be competitive binding as between the bioactive agent and the binding moiety, with the binding moiety displacing the bioactive agent.

[0230] In one embodiment, the candidate bioactive agent is labeled. Either the candidate bioactive agent, or the competitor, or both, is added first to the protein for a time sufficient to allow binding, if present. Incubations may be performed at any temperature which facilitates optimal activity, typically between 4 and 40° C. Incubation periods are selected for optimum activity, but may also be optimized to facilitate rapid high throughput screening. Typically between 0.1 and 1 hour will be sufficient. Excess reagent is generally removed or washed away. The second component is then added, and the presence or absence of the labeled component is followed, to indicate binding.

[0231] In a preferred embodiment, the competitor is added first, followed by the candidate bioactive agent. Displacement of the competitor is an indication that the candidate bioactive agent is binding to the CA protein and thus is capable of binding to, and potentially modulating, the activity of the CA protein. In this embodiment, either component can be labeled. Thus, for example, if the competitor is labeled, the presence of label in the wash solution indicates displacement by the agent. Alternatively, if the candidate bioactive agent is labeled, the presence of the label on the support indicates displacement.

[0232] In an alternative embodiment, the candidate bioactive agent is added first, with incubation and washing, followed by the competitor. The absence of binding by the competitor may indicate that the bioactive agent is bound to the CA protein with a higher affinity. Thus, if the candidate bioactive agent is labeled, the presence of the label on the support, coupled with a lack of competitor binding, may indicate that the candidate agent is capable of binding to the CA protein.

[0233] In a preferred embodiment, the methods comprise differential screening to identity bioactive agents that are capable of modulating the activity of the CA proteins. In this embodiment, the methods comprise combining a CA protein and a competitor in a first sample. A second sample comprises a candidate bioactive agent, a CA protein and a competitor. The binding of the competitor is determined for both samples, and a change, or difference in binding between the two samples indicates the presence of an agent capable of binding to the CA protein and potentially modulating its activity. That is, if the binding of the competitor is different in the second sample relative to the first sample, the agent is capable of binding to the CA protein.

[0234] Alternatively, a preferred embodiment utilizes differential screening to identify drug candidates that bind to the native CA protein, but cannot bind to modified CA proteins. The structure of the CA protein may be modeled, and used in rational drug design to synthesize agents that interact with that site. Drug candidates that affect CA bioactivity are also identified by screening drugs for the ability to either enhance or reduce the activity of the protein.

[0235] Positive controls and negative controls may be used in the assays. Preferably all control and test samples are performed in at least triplicate to obtain statistically significant results. Incubation of all samples is for a time sufficient for the binding of the agent to the protein. Following incubation, all samples are washed free of non-specifically bound material and the amount of bound, generally labeled agent determined. For example, where a radiolabel is employed, the samples may be counted in a scintillation counter to determine the amount of bound compound.

[0236] A variety of other reagents may be included in the screening assays. These include reagents like salts, neutral proteins, e.g. albumin, detergents, etc which may be used to facilitate optimal protein-protein binding and/or reduce non-specific or background interactions. Also reagents that otherwise improve the efficiency of the assay, such as protease inhibitors, nuclease inhibitors, anti-microbial agents, etc., may be used. The mixture of components may be added in any order that provides for the requisite binding.

[0237] Screening for agents that modulate the activity of CA proteins may also be done. In a preferred embodiment, methods for screening for a bioactive agent capable of modulating the activity of CA proteins comprise the steps of adding a candidate bioactive agent to a sample of CA proteins, as above, and determining an alteration in the biological activity of CA proteins. “Modulating the activity of a CA protein” includes an increase in activity, a decrease in activity, or a change in the type or kind of activity present. Thus, in this embodiment, the candidate agent should both bind to CA proteins (although this may not be necessary), and alter its biological or biochemical activity as defined herein. The methods include both in vitro screening methods, as are generally outlined above, and in vivo screening of cells for alterations in the presence, distribution, activity or amount of CA proteins.

[0238] Thus, in this embodiment, the methods comprise combining a CA sample and a candidate bioactive agent, and evaluating the effect on CA activity. By “CA activity” or grammatical equivalents herein is meant one of the CA protein's biological activities, including, but not limited to, its role in tumorigenesis, including cell division, preferably in lymphatic tissue, cell proliferation, tumor growth and transformation of cells. In one embodiment, CA activity includes activation of or by a protein encoded by a nucleic acid of Tables 1-15. An inhibitor of CA activity is the inhibition of any one or more CA activities.

[0239] In a preferred embodiment, the activity of the CA protein is increased; in another preferred embodiment, the activity of the CA protein is decreased. Thus, bioactive agents that are antagonists are preferred in some embodiments, and bioactive agents that are agonists may be preferred in other embodiments.

[0240] In a preferred embodiment, the invention provides methods for screening for bioactive agents capable of modulating the activity of a CA protein. The methods comprise adding a candidate bioactive agent, as defined above, to a cell comprising CA proteins. Preferred cell types include almost any cell. The cells contain a recombinant nucleic acid that encodes a CA protein. In a preferred embodiment, a library of candidate agents is tested on a plurality of cells.

[0241] In one aspect, the assays are evaluated in the presence or absence or previous or subsequent exposure of physiological signals, for example hormones, antibodies, peptides, antigens, cytokines, growth factors, action potentials, pharmacological agents including chemotherapeutics, radiation, carcinogenics, or other cells (i.e. cell-cell contacts). In another example, the determinations are determined at different stages of the cell cycle process.

[0242] In this way, bioactive agents are identified. Compounds with pharmacological activity are able to enhance or interfere with the activity of the CA protein.

Applications of the Invention

[0243] In one embodiment, a method of inhibiting cancer cell division is provided. In another embodiment, a method of inhibiting tumor growth is provided. In a further embodiment, methods of treating cells or individuals with cancer are provided.

[0244] The method comprises administration of a cancer inhibitor. In particular embodiments, the cancer inhibitor is an antisense molecule, a pharmaceutical composition, a therapeutic agent or small molecule, or a monoclonal, polyclonal, chimeric or humanized antibody. In particular embodiments, a therapeutic agent is coupled with a an antibody, preferable a monoclonal antobody.

[0245] In other embodiments, methods for detection or diagnosis of cancer cells in an individual are provided. In particular embodiments, the diagnostic/detection agent is a small molecule that pereferentially binds to a CAP according to the invention. In one embodiment, the diagnostic/detection agent is an antibody, preferably a monoclonal antobody, preferably linked to a detectable agent.

[0246] In other embodiments of the invention, animal models and transgenic animals are provided, which find use in generating animal models of cancers, particularly lymphomas and carcinomas.

(a) Antisense Molecules

[0247] In one embodiment, the cancer inhibitor is an antisense molecule. Antisense molecules as used herein include antisense or sense oligonucleotides comprising a single-stranded nucleic acid sequence (either RNA or DNA) capable of binding to target mRNA (sense) or DNA (antisense) sequences for cancer molecules. Antisense or sense oligonucleotides, according to the present invention, comprise a fragment generally at least about 14 nucleotides, preferably from about 14 to 30 nucleotides. The ability to derive an antisense or a sense oligonucleotide, based upon a cDNA sequence encoding a given protein is described in, for example, Stein and Cohen, Cancer Res. 48:2659, (1988) and van der Krol et al., BioTechniques 6:958, (1988).

[0248] Antisense molecules can be modified or unmodified RNA, DNA, or mixed polymer oligonucleotides. These molecules function by specifically binding to matching sequences resulting in inhibition of peptide synthesis (Wu-Pong, November 1994, BioPharm, 20-33) either by steric blocking or by activating an RNase H enzyme. Antisense molecules can also alter protein synthesis by interfering with RNA processing or transport from the nucleus into the cytoplasm (Mukhopadhyay & Roth, 1996, Crit. Rev. in Oncogenesis 7, 151-190). In addition, binding of single stranded DNA to RNA can result in nuclease-mediated degradation of the heteroduplex (Wu-Pong, supra). Backbone modified DNA chemistry which have thus far been shown to act as substrates for RNase H are phosphorothioates, phosphorodithioates, borontrifluoridates, and 2′-arabino and 2′-fluoro arabino-containing oligonucleotides.

[0249] Antisense molecules may be introduced into a cell containing the target nucleotide sequence by formation of a conjugate with a ligand binding molecule, as described in WO 91/04753. Suitable ligand binding molecules include, but are not limited to, cell surface receptors, growth factors, other cytokines, or other ligands that bind to cell surface receptors. Preferably, conjugation of the ligand binding molecule does not substantially interfere with the ability of the ligand binding molecule to bind to its corresponding molecule or receptor, or block entry of the sense or antisense oligonucleotide or its conjugated version into the cell. Alternatively, a sense or an antisense oligonucleotide may be introduced into a cell containing the target nucleic acid sequence by formation of an oligonucleotide-lipid complex, as described in WO 90/10448. It is understood that the use of antisense molecules or knock out and knock in models may also be used in screening assays as discussed above, in addition to methods of treatment.

(b) RNA Interference

[0250] RNA interference refers to the process of sequence-specific post transcriptional gene silencing in animals mediated by short interfering RNAs (siRNA) (Fire et al., Nature, 391, 806 (1998)). The corresponding process in plants is referred to as post transcriptional gene silencing or RNA silencing and is also referred to as quelling in fungi. The presence of dsRNA in cells triggers the RNAi response though a mechanism that has yet to be fully characterized. This mechanism appears to be different from the interferon response that results from dsRNA mediated activation of protein kinase PKR and 2′,5′-oligoadenylate synthetase resulting in non-specific cleavage of mRNA by ribonuclease L. (reviewed in Sharp, P. A., RNA interference—2001, Genes & Development 15:485-490 (2001)).

[0251] Small interfering RNAs (siRNAs) are powerful sequence-specific reagents designed to suppress the expression of genes in cultured mammalian cells through a process known as RNA interference (RNAi). Elbashir, S. M. et al. Nature 411:494-498 (2001); Caplen, N. J. et al. Proc. Natl. Acad. Sci. USA 98:9742-9747 (2001); Harborth, J. et al. J. Cell Sci. 114:4557-4565 (2001). The term “short interfering RNA” or “siRNA” refers to a double stranded nucleic acid molecule capable of RNA interference “RNAi”, (see Kreutzer et al., WO 00/44895; Zernicka-Goetz et al. WO 01/36646; Fire, WO 99/32619; Mello and Fire, WO 01/29058). As used herein, siRNA molecules are limited to RNA molecules but further encompasses chemically modified nucleotides and non-nucleotides. siRNA gene-targeting experiments have been carried out by transient siRNA transfer into cells (achieved by such classic methods as liposome-mediated transfection, electroporation, or microinjection).

[0252] Molecules of siRNA are 21- to 23-nucleotide RNAs, with characteristic 2- to 3-nucleotide 3′-overhanging ends resembling the RNase III processing products of long double-stranded RNAs (dsRNAs) that normally initiate RNAi. When introduced into a cell, they assemble with yet-to-be-identified proteins of an endonuclease complex (RNA-induced silencing complex), which then guides target mRNA cleavage. As a consequence of degradation of the targeted mRNA, cells with a specific phenotype characteristic of suppression of the corresponding protein product are obtained. The small size of siRNAs, compared with traditional antisense molecules, prevents activation of the dsRNA-inducible interferon system present in mammalian cells. This avoids the nonspecific phenotypes normally produced by dsRNA larger than 30 base pairs in somatic cells.

[0253] Intracellular transcription of small RNA molecules is achieved by cloning the siRNA templates into RNA polymerase III (Pol III) transcription units, which normally encode the small nuclear RNA (snRNA) U6 or the human RNase P RNA H1. Two approaches have been developed for expressing siRNAs: in the first, sense and antisense strands constituting the siRNA duplex are transcribed by individual promoters (Lee, N. S. et al. Nat. Biotechnol. 20, 500-505 (2002). Miyagishi, M. & Taira, K. Nat. Biotechnol. 20, 497-500 (2002).); in the second, siRNAs are expressed as fold-back stem-loop structures that give rise to siRNAs after intracellular processing (Paul, C. P. et al. Nat. Biotechnol. 20:505-508 (2002)). The endogenous expression of siRNAs from introduced DNA templates is thought to overcome some limitations of exogenous siRNA delivery, in particular the transient loss of phenotype. U6 and H1 RNA promoters are members of the type III class of Pol III promoters. (Paule, M. R. & White, R. J. Nucleic Acids Res. 28, 1283-1298 (2000)).

[0254] Co-expression of sense and antisense siRNAs mediate silencing of target genes, whereas expression of sense or antisense siRNA alone do not greatly affect target gene expression. Transfection of plasmid DNA, rather than synthetic siRNAs, may appear advantageous, considering the danger of RNase contamination and the costs of chemically synthesized siRNAs or siRNA transcription kits. Stable expression of siRNAs allows new gene therapy applications, such as treatment of persistent viral infections. Considering the high specificity of siRNAs, the approach also allows the targeting of disease-derived transcripts with point mutations, such as RAS or TP53 oncogene transcripts, without alteration of the remaining wild-type allele. Finally, by high-throughput sequence analysis of the various genomes, the DNA-based methodology may also be a cost-effective alternative for automated genome-wide loss-of-function phenotypic analysis, especially when combined with miniaturized array-based phenotypic screens. (Ziauddin, J. & Sabatini, D. M. Nature 411:107-110 (2001)).

[0255] The presence of long dsRNAs in cells stimulates the activity of a ribonuclease III enzyme referred to as dicer. Dicer is involved in the processing of the dsRNA into short pieces of dsRNA known as short interfering RNAs (siRNA) (Berstein et al., 2001, Nature, 409:363 (2001)). Short interfering RNAs derived from dicer activity are typically about 21-23 nucleotides in length and comprise about 19 base pair duplexes. Dicer has also been implicated in the excision of 21 and 22 nucleotide small temporal RNAs (stRNA) from precursor RNA of conserved structure that are implicated in translational control (Hutvagner et al., Science, 293, 834 (2001)). The RNAi response also features an endonuclease complex containing a siRNA, commonly referred to as an RNA-induced silencing complex (RISC), which mediates cleavage of single stranded RNA having sequence homologous to the siRNA. Cleavage of the target RNA takes place in the middle of the region complementary to the guide sequence of the siRNA duplex (Elbashir et al., Genes Dev., 15, 188 (2001)).

[0256] This invention provides an expression system comprising an isolated nucleic acid molecule comprising a sequence capable of specifically hybridizing to the CA sequences. In an embodiment, the nucleic acid molecule is capable of inhibiting the expression of the CA protein. A method of inhibiting expression of CA inside a cell by a vector-directed expression of a short RNA which short RNA can fold in itself and create a double strand RNA having CA mRNA sequence identity and able to trigger posttranscriptional gene silencing, or RNA interference (RNAi), of the CA gene inside the cell. In another method a short double strand RNA having CA mRNA sequence identity is delivered inside the cell to trigger posttranscriptional gene silencing, or RNAi, of the CA gene. In various embodiments, the nucleic acid molecule is at least a 7 mer, at least a 10 mer, or at least a 20 mer. In a further embodiment, the sequence is unique.

(c) Pharmaceutical Compositions

[0257] Pharmaceutical compositions encompassed by the present invention include as active agent, the polypeptides, polynucleotides, antisense oligonucleotides, or antibodies of the invention disclosed herein in a therapeutically effective amount. An “effective amount” is an amount sufficient to effect beneficial or desired results, including clinical results. An effective amount can be administered in one or more administrations. For purposes of this invention, an effective amount of an adenoviral vector is an amount that is sufficient to palliate, ameliorate, stabilize, reverse, slow or delay the progression of the disease state.

[0258] The compositions can be used to treat cancer as well as metastases of primary cancer. In addition, the pharmaceutical compositions can be used in conjunction with conventional methods of cancer treatment, e.g., to sensitize tumors to radiation or conventional chemotherapy. The terms “treatment”, “treating”, “treat” and the like are used herein to generally refer to obtaining a desired pharmacologic and/or physiologic effect. The effect may be prophylactic in terms of completely or partially preventing a disease or symptom thereof and/or may be therapeutic in terms of a partial or complete stabilization or cure for a disease and/or adverse effect attributable to the disease. “Treatment” as used herein covers any treatment of a disease in a mammal, particularly a human, and includes: (a) preventing the disease or symptom from occurring in a subject which may be predisposed to the disease or symptom but has not yet been diagnosed as having it; (b) inhibiting the disease symptom, i.e., arresting its development; or (c) relieving the disease symptom, i.e., causing regression of the disease or symptom.

[0259] Where the pharmaceutical composition comprises an antibody that specifically binds to a gene product encoded by a differentially expressed polynucleotide, the antibody can be coupled to a drug for delivery to a treatment site or coupled to a detectable label to facilitate imaging of a site comprising cancer cells, such as prostate cancer cells. Methods for coupling antibodies to drugs and detectable labels are well known in the art, as are methods for imaging using detectable labels.

[0260] A “patient” for the purposes of the present invention includes both humans and other animals, particularly mammals, and organisms. Thus the methods are applicable to both human therapy and veterinary applications. In the preferred embodiment the patient is a mammal, and in the most preferred embodiment the patient is human.

[0261] The term “therapeutically effective amount” as used herein refers to an amount of a therapeutic agent to treat, ameliorate, or prevent a desired disease or condition, or to exhibit a detectable therapeutic or preventative effect. The effect can be detected by, for example, chemical markers or antigen levels. Therapeutic effects also include reduction in physical symptoms, such as decreased body temperature. The precise effective amount for a subject will depend upon the subject's size and health, the nature and extent of the condition, and the therapeutics or combination of therapeutics selected for administration. The effective amount for a given situation is determined by routine experimentation and is within the judgment of the clinician. For purposes of the present invention, an effective dose will generally be from about 0.01 mg/kg to about 5 mg/kg, or about 0.01 mg/kg to about 50 mg/kg or about 0.05 mg/kg to about 10 mg/kg of the compositions of the present invention in the individual to which it is administered.

[0262] A pharmaceutical composition can also contain a pharmaceutically acceptable carrier. The term “pharmaceutically acceptable carrier” refers to a carrier for administration of a therapeutic agent, such as antibodies or a polypeptide, genes, and other therapeutic agents. The term refers to any pharmaceutical carrier that does not itself induce the production of antibodies harmful to the individual receiving the composition, and which can be administered without undue toxicity. Suitable carriers can be large, slowly metabolized macromolecules such as proteins, polysaccharides, polylacetic acids, polyglycolic acids, polymeric amino acids, amino acid copolymers, and inactive virus particles. Such carriers are well known to those of ordinary skill in the art. Pharmaceutically acceptable carriers in therapeutic compositions can include liquids such as water, saline, glycerol and ethanol. Auxiliary substances, such as wetting or emulsifying agents, pH buffering substances, and the like, can also be present in such vehicles. Typically, the therapeutic compositions are prepared as injectables, either as liquid solutions or suspensions; solid forms suitable for solution in, or suspension in, liquid vehicles prior to injection can also be prepared. Liposomes are included within the definition of a pharmaceutically acceptable carrier. Pharmaceutically acceptable salts can also be present in the pharmaceutical composition, e.g., mineral acid salts such as hydrochlorides, hydrobromides, phosphates, sulfates, and the like; and the salts of organic acids such as acetates, propionates, malonates, benzoates, and the like. A thorough discussion of pharmaceutically acceptable excipients is available in Remington: The Science and Practice of Pharmacy (1995) Alfonso Gennaro, Lippincott, Williams, & Wilkins.

[0263] The pharmaceutical compositions can be prepared in various forms, such as granules, tablets, pills, suppositories, capsules, suspensions, salves, lotions and the like. Pharmaceutical grade organic or inorganic carriers and/or diluents suitable for oral and topical use can be used to make up compositions containing the therapeutically-active compounds. Diluents known to the art include aqueous media, vegetable and animal oils and fats. Stabilizing agents, wetting and emulsifying agents, salts for varying the osmotic pressure or buffers for securing an adequate pH value, and skin penetration enhancers can be used as auxiliary agents.

[0264] The pharmaceutical compositions of the present invention comprise a CA protein in a form suitable for administration to a patient. In the preferred embodiment, the pharmaceutical compositions are in a water soluble form, such as being present as pharmaceutically acceptable salts, which is meant to include both acid and base addition salts. “Pharmaceutically acceptable acid addition salt” refers to those salts that retain the biological effectiveness of the free bases and that are not biologically or otherwise undesirable, formed with inorganic acids such as hydrochloric acid, hydrobromic acid, sulfuric acid, nitric acid, phosphoric acid and the like, and organic acids such as acetic acid, propionic acid, glycolic acid, pyruvic acid, oxalic acid, maleic acid, malonic acid, succinic acid, fumaric acid, tartaric acid, citric acid, benzoic acid, cinnamic acid, mandelic acid, methanesulfonic acid, ethanesulfonic acid, p-toluenesulfonic acid, salicylic acid and the like. “Pharmaceutically acceptable base addition salts” include those derived from inorganic bases such as sodium, potassium, lithium, ammonium, calcium, magnesium, iron, zinc, copper, manganese, aluminum salts and the like. Particularly preferred are the ammonium, potassium, sodium, calcium, and magnesium salts. Salts derived from pharmaceutically acceptable organic non-toxic bases include salts of primary, secondary, and tertiary amines, substituted amines including naturally occurring substituted amines, cyclic amines and basic ion exchange resins, such as isopropylamine, trimethylamine, diethylamine, triethylamine, tripropylamine, and ethanolamine.

[0265] The pharmaceutical compositions may also include one or more of the following: carrier proteins such as serum albumin; buffers; fillers such as microcrystalline cellulose, lactose, corn and other starches; binding agents; sweeteners and other flavoring agents; coloring agents; and polyethylene glycol. Additives are well known in the art, and are used in a variety of formulations.

[0266] The compounds having the desired pharmacological activity may be administered in a physiologically acceptable carrier to a host, as previously described. The agents may be administered in a variety of ways, orally, parenterally e.g., subcutaneously, intraperitoneally, intravascularly, etc. Depending upon the manner of introduction, the compounds may be formulated in a variety of ways. The concentration of therapeutically active compound in the formulation may vary from about 0.1-100% wgt/vol. Once formulated, the compositions contemplated by the invention can be (1) administered directly to the subject (e.g., as polynucleotide, polypeptides, small molecule agonists or antagonists, and the like); or (2) delivered ex vivo, to cells derived from the subject (e.g., as in ex vivo gene therapy). Direct delivery of the compositions will generally be accomplished by parenteral injection, e.g., subcutaneously, intraperitoneally, intravenously or intramuscularly, intratumoral or to the interstitial space of a tissue. Other modes of administration include oral and pulmonary administration, suppositories, and transdermal applications, needles, and gene guns or hyposprays. Dosage treatment can be a single dose schedule or a multiple dose schedule.

[0267] Methods for the ex vivo delivery and reimplantation of transformed cells into a subject are known in the art and described in e.g., International Publication No. WO 93/14778. Examples of cells useful in ex vivo applications include, for example, stem cells, particularly hematopoetic, lymph cells, macrophages, dendritic cells, or tumor cells. Generally, delivery of nucleic acids for both ex vivo and in vitro applications can be accomplished by, for example, dextran-mediated transfection, calcium phosphate precipitation, polybrene mediated transfection, protoplast fusion, electroporation, encapsulation of the polynucleotide(s) in liposomes, and direct microinjection of the DNA into nuclei, all well known in the art.

[0268] Once differential expression of a gene corresponding to a CA polynucleotide described herein has been found to correlate with a proliferative disorder, such as neoplasia, dysplasia, and hyperplasia, the disorder can be amenable to treatment by administration of a therapeutic agent based on the provided polynucleotide, corresponding polypeptide or other corresponding molecule (e.g., antisense, ribozyme, etc.). In other embodiments, the disorder can be amenable to treatment by administration of a small molecule drug that, for example, serves as an inhibitor (antagonist) of the function of the encoded gene product of a gene having increased expression in cancerous cells relative to normal cells or as an agonist for gene products that are decreased in expression in cancerous cells (e.g., to promote the activity of gene products that act as tumor suppressors).

[0269] The dose and the means of administration of the inventive pharmaceutical compositions are determined based on the specific qualities of the therapeutic composition, the condition, age, and weight of the patient, the progression of the disease, and other relevant factors. For example, administration of polynucleotide therapeutic compositions agents includes local or systemic administration, including injection, oral administration, particle gun or catheterized administration, and topical administration. Preferably, the therapeutic polynucleotide composition contains an expression construct comprising a promoter operably linked to a polynucleotide of at least 12, 22, 25, 30, or 35 contiguous nt of the polynucleotide disclosed herein. Various methods can be used to administer the therapeutic composition directly to a specific site in the body. For example, a small metastatic lesion is located and the therapeutic composition injected several times in several different locations within the body of tumor. Alternatively, arteries that serve a tumor are identified, and the therapeutic composition injected into such an artery, in order to deliver the composition directly into the tumor. A tumor that has a necrotic center is aspirated and the composition injected directly into the now empty center of the tumor. An antisense composition is directly administered to the surface of the tumor, for example, by topical application of the composition. X-ray imaging is used to assist in certain of the above delivery methods.

[0270] Targeted delivery of therapeutic compositions containing an antisense polynucleotide, subgenomic polynucleotides, or antibodies to specific tissues can also be used. Receptor-mediated DNA delivery techniques are described in, for example, Findeis et al., Trends Biotechnol. (1993) 11:202; Chiou et al., Gene Therapeutics: Methods And Applications Of Direct Gene Transfer (J. A. Wolff, ed.) (1994); Wu et al., J. Biol. Chem. (1988) 263:621; Wu et al., J. Biol. Chem. (1994) 269:542; Zenke et al., Proc. Natl. Acad. Sci. (USA) (1990) 87:3655; Wu et al., J. Biol. Chem. (1991) 266:338. Therapeutic compositions containing a polynucleotide are administered in a range of about 100 ng to about 200 mg of DNA for local administration in a gene therapy protocol. Concentration ranges of about 500 ng to about 50 mg, about 1 μg to about 2 mg, about 5 μg to about 500 μg, and about 20 μg to about 100 μg of DNA can also be used during a gene therapy protocol. Factors such as method of action (e.g., for enhancing or inhibiting levels of the encoded gene product) and efficacy of transformation and expression are considerations that will affect the dosage required for ultimate efficacy of the antisense subgenomic polynucleotides. Where greater expression is desired over a larger area of tissue, larger amounts of antisense subgenomic polynucleotides or the same amounts re-administered in a successive protocol of administrations, or several administrations to different adjacent or close tissue portions of, for example, a tumor site, may be required to effect a positive therapeutic outcome. In all cases, routine experimentation in clinical trials will determine specific ranges for optimal therapeutic effect.

[0271] The therapeutic polynucleotides and polypeptides of the present invention can be delivered using gene delivery vehicles. The gene delivery vehicle can be of viral or non-viral origin (see generally, Jolly, Cancer Gene Therapy (1994) 1:51; Kimura, Human Gene Therapy (1994) 5:845; Connelly, Human Gene Therapy (1995) 1:185; and Kaplitt, Nature Genetics (1994) 6:148). Expression of such coding sequences can be induced using endogenous mammalian or heterologous promoters. Expression of the coding sequence can be either constitutive or regulated.

[0272] Viral-based vectors for delivery of a desired polynucleotide and expression in a desired cell are well known in the art. Exemplary viral-based vehicles include, but are not limited to, recombinant retroviruses (see, e.g., WO 90/07936; WO 94/03622; WO 93/25698; WO 93/25234; U.S. Pat. No. 5,219,740; WO 93/11230; WO 93/10218; U.S. Pat. No. 4,777,127; GB Patent No. 2,200,651; EP 0 345 242; and WO 91/02805), alphavirus-based vectors (e.g., Sindbis virus vectors, Semliki forest virus (ATCC VR-67; ATCC VR-1247), Ross River virus (ATCC VR-373; ATCC VR-1246) and Venezuelan equine encephalitis virus (ATCC VR-923; ATCC VR-1250; ATCC VR 1249; ATCC VR-532)), and adeno-associated virus (AAV) vectors (see, e.g., WO 94/12649, WO 93/03769; WO 93/19191; WO 94/28938; WO 95/11984 and WO 95/00655). Administration of DNA linked to killed adenovirus as described in Curiel, Hum. Gene Ther. (1992) 3:147 can also be employed.

[0273] Non-viral delivery vehicles and methods can also be employed, including, but not limited to, polycationic condensed DNA linked or unlinked to killed adenovirus alone (see, e.g., Curiel, Hum. Gene Ther. (1992) 3:147); ligand-linked DNA (see, e.g., Wu, J. Biol. Chem. (1989) 264:16985); eukaryotic cell delivery vehicles cells (see, e.g., U.S. Pat. No. 5,814,482; WO 95/07994; WO 96/17072; WO 95/30763; and WO 97/42338) and nucleic charge neutralization or fusion with cell membranes. Naked DNA can also be employed. Exemplary naked DNA introduction methods are described in WO 90/11092 and U.S. Pat. No. 5,580,859. Liposomes that can act as gene delivery vehicles are described in U.S. Pat. No. 5,422,120; WO 95/13796; WO 94/23697; WO 91/14445; and EP 0524968. Additional approaches are described in Philip, Mol. Cell. Biol. (1994) 14:2411, and in Woffendin, Proc. Natl. Acad. Sci. (1994) 91:1581.

[0274] Further non-viral delivery suitable for use includes mechanical delivery systems such as the approach described in Woffendin et al., Proc. Natl. Acad. Sci. USA (1994) 91(24):11581. Moreover, the coding sequence and the product of expression of such can be delivered through deposition of photopolymerized hydrogel materials or use of ionizing radiation (see, e.g., U.S. Pat. No. 5,206,152 and WO 92/11033). Other conventional methods for gene delivery that can be used for delivery of the coding sequence include, for example, use of hand-held gene transfer particle gun (see, e.g., U.S. Pat. No. 5,149,655); use of ionizing radiation for activating transferred gene (see, e.g., U.S. Pat. No. 5,206,152 and WO 92/11033).

[0275] The administration of the CA proteins and modulators of the present invention can be done in a variety of ways as discussed above, including, but not limited to, orally, subcutaneously, intravenously, intranasally, transdermally, intraperitoneally, intramuscularly, intrapulmonary, vaginally, rectally, or intraocularly. In some instances, for example, in the treatment of wounds and inflammation, the CA proteins and modulators may be directly applied as a solution or spray.

[0276] In a preferred embodiment, CA proteins and modulators are administered as therapeutic agents, and can be formulated as outlined above. Similarly, CA genes (including both the full-length sequence, partial sequences, or regulatory sequences of the CA coding regions) can be administered in gene therapy applications, as is known in the art. These CA genes can include antisense applications, either as gene therapy (i.e. for incorporation into the genome) or as antisense compositions, as will be appreciated by those in the art.

[0277] Thus, in one embodiment, methods of modulating CA gene activity in cells or organisms are provided. In one embodiment, the methods comprise administering to a cell an anti-CA antibody that reduces or eliminates the biological activity of an endogenous CA protein. Alternatively, the methods comprise administering to a cell or organism a recombinant nucleic acid encoding a CA protein. As will be appreciated by those in the art, this may be accomplished in any number of ways. In a preferred embodiment, for example when the CA sequence is down-regulated in cancer, the activity of the CA gene product is increased by increasing the amount of CA expression in the cell, for example by overexpressing the endogenous CA gene or by administering a gene encoding the CA sequence, using known gene-therapy techniques. In a preferred embodiment, the gene therapy techniques include the incorporation of the exogenous gene using enhanced homologous recombination (EHR), for example as described in PCT/US93/03868, hereby incorporated by reference in its entirety. Alternatively, for example when the CA sequence is up-regulated in cancer, the activity of the endogenous CA gene is decreased, for example by the administration of a CA antisense nucleic acid.

(d) Vaccines

[0278] In a preferred embodiment, CA genes are administered as DNA vaccines, either single genes or combinations of CA genes. Naked DNA vaccines are generally known in the art. Brower, Nature Biotechnology, 16:1304-1305 (1998).

[0279] In one embodiment, CA genes of the present invention are used as DNA vaccines. Methods for the use of genes as DNA vaccines are well known to one of ordinary skill in the art, and include placing a CA gene or portion of a CA gene under the control of a promoter for expression in a patient with cancer. The CA gene used for DNA vaccines can encode full-length CA proteins, but more preferably encodes portions of the CA proteins including peptides derived from the CA protein. In a preferred embodiment a patient is immunized with a DNA vaccine comprising a plurality of nucleotide sequences derived from a CA gene. Similarly, it is possible to immunize a patient with a plurality of CA genes or portions thereof. Without being bound by theory, expression of the polypeptide encoded by the DNA vaccine, cytotoxic T-cells, helper T-cells and antibodies are induced that recognize and destroy or eliminate cells expressing CA proteins.

[0280] In a preferred embodiment, the DNA vaccines include a gene encoding an adjuvant molecule with the DNA vaccine. Such adjuvant molecules include cytokines that increase the immunogenic response to the CA polypeptide encoded by the DNA vaccine. Additional or alternative adjuvants are known to those of ordinary skill in the art and find use in the invention.

(e) Antibodies

[0281] In one embodiment, a cancer inhibitor is an antibody as discussed above. In one embodiment, the CA proteins of the present invention may be used to generate polyclonal and monoclonal antibodies to CA proteins, which are useful as described herein. Similarly, the CA proteins can be coupled, using standard technology, to affinity chromatography columns. These columns may then be used to purify CA antibodies. In a preferred embodiment, the antibodies are generated to epitopes unique to a CA protein; that is, the antibodies show little or no cross-reactivity to other proteins. These antibodies find use in a number of applications. For example, the CA antibodies may be coupled to standard affinity chromatography columns and used to purify CA proteins. The antibodies may also be used therapeutically as blocking polypeptides, as outlined above, since they will specifically bind to the CA protein.

[0282] The present invention further provides methods for detecting the presence of and/or measuring a level of a polypeptide in a biological sample, which CA polypeptide is encoded by a CA polynucleotide that is differentially expressed in a cancer cell, using an antibody specific for the encoded polypeptide. The methods generally comprise: a) contacting the sample with an antibody specific for a polypeptide encoded by a CA polynucleotide that is differentially expressed in a prostate cancer cell; and b) detecting binding between the antibody and molecules of the sample.

[0283] Detection of specific binding of the antibody specific for the encoded cancer-associated polypeptide, when compared to a suitable control is an indication that encoded polypeptide is present in the sample. Suitable controls include a sample known not to contain the encoded CA polypeptide or known not to contain elevated levels of the polypeptide; such as normal tissue, and a sample contacted with an antibody not specific for the encoded polypeptide, e.g., an anti-idiotype antibody. A variety of methods to detect specific antibody-antigen interactions are known in the art and can be used in the method, including, but not limited to, standard immunohistological methods, immunoprecipitation, an enzyme immunoassay, and a radioimmunoassay. In general, the specific antibody will be detectably labeled, either directly or indirectly. Direct labels include radioisotopes; enzymes whose products are detectable (e.g., luciferase, β-galactosidase, and the like); fluorescent labels (e.g., fluorescein isothiocyanate, rhodamine, phycoerythrin, and the like); fluorescence emitting metals, e.g., ¹⁵²Eu, or others of the lanthanide series, attached to the antibody through metal chelating groups such as EDTA; chemiluminescent compounds, e.g., luminol, isoluminol, acridinium salts, and the like; bioluminescent compounds, e.g., luciferin, aequorin (green fluorescent protein), and the like. The antibody may be attached (coupled) to an insoluble support, such as a polystyrene plate or a bead. Indirect labels include second antibodies specific for antibodies specific for the encoded polypeptide (“first specific antibody”), wherein the second antibody is labeled as described above; and members of specific binding pairs, e.g., biotin-avidin, and the like. The biological sample may be brought into contact with and immobilized on a solid support or carrier, such as nitrocellulose, that is capable of immobilizing cells, cell particles, or soluble proteins. The support may then be washed with suitable buffers, followed by contacting with a detectably-labeled first specific antibody. Detection methods are known in the art and will be chosen as appropriate to the signal emitted by the detectable label. Detection is generally accomplished in comparison to suitable controls, and to appropriate standards.

[0284] In some embodiments, the methods are adapted for use in vivo, e.g., to locate or identify sites where cancer cells are present. In these embodiments, a detectably-labeled moiety, e.g., an antibody, which is specific for a cancer-associated polypeptide is administered to an individual (e.g., by injection), and labeled cells are located using standard imaging techniques, including, but not limited to, magnetic resonance imaging, computed tomography scanning, and the like. In this manner, cancer cells are differentially labeled.

(f) Detection and Diagnosis of Cancers

[0285] Without being bound by theory, it appears that the various CA sequences are important in cancers. Accordingly, disorders based on mutant or variant CA genes may be determined. In one embodiment, the invention provides methods for identifying cells containing variant CA genes comprising determining all or part of the sequence of at least one endogenous CA genes in a cell. As will be appreciated by those in the art, this may be done using any number of sequencing techniques. In a preferred embodiment, the invention provides methods of identifying the CA genotype of an individual comprising determining all or part of the sequence of at least one CA gene of the individual. This is generally done in at least one tissue of the individual, and may include the evaluation of a number of tissues or different samples of the same tissue. The method may include comparing the sequence of the sequenced CA gene to a known CA gene, i.e., a wild-type gene. As will be appreciated by those in the art, alterations in the sequence of some CA genes can be an indication of either the presence of the disease, or propensity to develop the disease, or prognosis evaluations.

[0286] The sequence of all or part of the CA gene can then be compared to the sequence of a known CA gene to determine if any differences exist. This can be done using any number of known homology programs, such as Bestfit, etc. In a preferred embodiment, the presence of a difference in the sequence between the CA gene of the patient and the known CA gene is indicative of a disease state or a propensity for a disease state, as outlined herein.

[0287] In a preferred embodiment, the CA genes are used as probes to determine the number of copies of the CA gene in the genome. For example, some cancers exhibit chromosomal deletions or insertions, resulting in an alteration in the copy number of a gene.

[0288] In another preferred embodiment CA genes are used as probes to determine the chromosomal location of the CA genes. Information such as chromosomal location finds use in providing a diagnosis or prognosis in particular when chromosomal abnormalities such as translocations, and the like are identified in CA gene loci.

[0289] The present invention provides methods of using the polynucleotides described herein for detecting cancer cells, facilitating diagnosis of cancer and the severity of a cancer (e.g., tumor grade, tumor burden, and the like) in a subject, facilitating a determination of the prognosis of a subject, and assessing the responsiveness of the subject to therapy (e.g., by providing a measure of therapeutic effect through, for example, assessing tumor burden during or following a chemotherapeutic regimen). Detection can be based on detection of a polynucleotide that is differentially expressed in a cancer cell, and/or detection of a polypeptide encoded by a polynucleotide that is differentially expressed in a cancer cell. The detection methods of the invention can be conducted in vitro or in vivo, on isolated cells, or in whole tissues or a bodily fluid e.g., blood, plasma, serum, urine, and the like).

[0290] In some embodiments, methods are provided for detecting a cancer cell by detecting expression in the cell of a transcript that is differentially expressed in a cancer cell. Any of a variety of known methods can be used for detection, including, but not limited to, detection of a transcript by hybridization with a polynucleotide that hybridizes to a polynucleotide that is differentially expressed in a prostate cancer cell; detection of a transcript by a polymerase chain reaction using specific oligonucleotide primers; in situ hybridization of a cell using as a probe a polynucleotide that hybridizes to a gene that is differentially expressed in a prostate cancer cell. The methods can be used to detect and/or measure mRNA levels of a gene that is differentially expressed in a cancer cell. In some embodiments, the methods comprise: a) contacting a sample with a polynucleotide that corresponds to a differentially expressed gene described herein under conditions that allow hybridization; and b) detecting hybridization, if any.

[0291] Detection of differential hybridization, when compared to a suitable control, is an indication of the presence in the sample of a polynucleotide that is differentially expressed in a cancer cell. Appropriate controls include, for example, a sample that is known not to contain a polynucleotide that is differentially expressed in a cancer cell, and use of a labeled polynucleotide of the same “sense” as the polynucleotide that is differentially expressed in the cancer cell. Conditions that allow hybridization are known in the art, and have been described in more detail above. Detection can also be accomplished by any known method, including, but not limited to, in situ hybridization, PCR (polymerase chain reaction), RT-PCR (reverse transcription-PCR), TMA, bDNA, and Nasbau and “Northern” or RNA blotting, or combinations of such techniques, using a suitably labeled polynucleotide. A variety of labels and labeling methods for polynucleotides are known in the art and can be used in the assay methods of the invention. Specificity of hybridization can be determined by comparison to appropriate controls.

[0292] Polynucleotides generally comprising at least 10 nt, at least 12 nt or at least 15 contiguous nucleotides of a polynucleotide provided herein, such as, for example, those having the sequence as depicted in Tables 1-15, are used for a variety of purposes, such as probes for detection of and/or measurement of, transcription levels of a polynucleotide that is differentially expressed in a prostate cancer cell. As will be readily appreciated by the ordinarily skilled artisan, the probe can be detectably labeled and contacted with, for example, an array comprising immobilized polynucleotides obtained from a test sample (e.g., mRNA). Alternatively, the probe can be immobilized on an array and the test sample detectably labeled. These and other variations of the methods of the invention are well within the skill in the art and are within the scope of the invention.

[0293] Nucleotide probes are used to detect expression of a gene corresponding to the provided polynucleotide. In Northern blots, mRNA is separated electrophoretically and contacted with a probe. A probe is detected as hybridizing to an mRNA species of a particular size. The amount of hybridization can be quantitated to determine relative amounts of expression, for example under a particular condition. Probes are used for in situ hybridization to cells to detect expression. Probes can also be used in vivo for diagnostic detection of hybridizing sequences. Probes are typically labeled with a radioactive isotope. Other types of detectable labels can be used such as chromophores, fluorophores, and enzymes. Other examples of nucleotide hybridization assays are described in WO92/02526 and U.S. Pat. No. 5,124,246.

[0294] PCR is another means for detecting small amounts of target nucleic acids (see, e.g., Mullis et al., Meth. Enzymol. (1987) 155:335; U.S. Pat. No. 4,683,195; and U.S. Pat. No. 4,683,202). Two primer oligonucleotides that hybridize with the target nucleic acids are used to prime the reaction. The primers can be composed of sequence within or 3′ and 5′ to the CA polynucleotides disclosed herein. Alternatively, if the primers are 3′ and 5′ to these polynucleotides, they need not hybridize to them or the complements. After amplification of the target with a thermostable polymerase, the amplified target nucleic acids can be detected by methods known in the art, e.g., Southern blot, mRNA or cDNA can also be detected by traditional blotting techniques (e.g., Southern blot, Northern blot, etc.) described in Sambrook et al., “Molecular Cloning: A Laboratory Manual” (New York, Cold Spring Harbor Laboratory, 1989) (e.g., without PCR amplification). In general, mRNA or cDNA generated from mRNA using a polymerase enzyme can be purified and separated using gel electrophoresis, and transferred to a solid support, such as nitrocellulose. The solid support is exposed to a labeled probe, washed to remove any unhybridized probe, and duplexes containing the labeled probe are detected.

[0295] Methods using PCR amplification can be performed on the DNA from a single cell, although it is convenient to use at least about 10⁵ cells. The use of the polymerase chain reaction is described in Saiki et al. (1985) Science 239:487, and a review of current techniques may be found in Sambrook, et al. Molecular Cloning: A Laboratory Manual, CSH Press 1989, pp. 14.2-14.33. A detectable label may be included in the amplification reaction. Suitable detectable labels include fluorochromes, (e.g. fluorescein isothiocyanate (FITC), rhodamine, Texas Red, phycoerythrin, allophycocyanin, 6-carboxyfluorescein (6-FAM), 2′,7′-dimethoxy-4′,5′-dichloro-6-carboxyfluorescein, 6-carboxy-X-rhodamine (ROX), 6-carboxy-2′,4′,7′,4,7-hexachlorofluorescein (HEX), 5-carboxyfluorescein (5-FAM) or N,N,N′,N′-tetramethyl-6-carboxyrhodamine (TAMRA)), radioactive labels, (e.g. ³²P, ³⁵S, ³H, etc.), and the like. The label may be a two stage system, where the polynucleotides is conjugated to biotin, haptens, etc. having a high affinity binding partner, e.g. avidin, specific antibodies, etc., where the binding partner is conjugated to a detectable label. The label may be conjugated to one or both of the primers. Alternatively, the pool of nucleotides used in the amplification is labeled, so as to incorporate the label into the amplification product.

[0296] The detection methods can be provided as part of a kit. Thus, the invention further provides kits for detecting the presence and/or a level of a polynucleotide that is differentially expressed in a cancer cell (e.g., by detection of an mRNA encoded by the differentially expressed gene of interest), and/or a polypeptide encoded thereby, in a biological sample. Procedures using these kits can be performed by clinical laboratories, experimental laboratories, medical practitioners, or private individuals. The kits of the invention for detecting a polypeptide encoded by a polynucleotide that is differentially expressed in a cancer cell may comprise a moiety that specifically binds the polypeptide, which may be an antibody that binds the polypeptide or fragment thereof. The kits of the invention used for detecting a polynucleotide that is differentially expressed in a prostate cancer cell may comprise a moiety that specifically hybridizes to such a polynucleotide. The kit may optionally provide additional components that are useful in the procedure, including, but not limited to, buffers, developing reagents, labels, reacting surfaces, means for detection, control samples, standards, instructions, and interpretive information. Accordingly, the present invention provides kits for detecting prostate cancer comprising at least one of polynucleotides having the sequence as shown in Tables 1-15 or fragments thereof.

[0297] The present invention further relates to methods of detecting/diagnosing a neoplastic or preneoplastic condition in a mammal (for example, a human). “Diagnosis” as used herein generally includes determination of a subject's susceptibility to a disease or disorder, determination as to whether a subject is presently affected by a disease or disorder, prognosis of a subject affected by a disease or disorder (e.g., identification of pre-metastatic or metastatic cancerous states, stages of cancer, or responsiveness of cancer to therapy), and therametrics (e.g., monitoring a subject's condition to provide information as to the effect or efficacy of therapy).

[0298] The terms “treatment”, “treating”, “treat” and the like are used herein to generally refer to obtaining a desired pharmacologic and/or physiologic effect. The effect may be prophylactic in terms of completely or partially preventing a disease or symptom thereof and/or may be therapeutic in terms of a partial or complete stabilization or cure for a disease and/or adverse effect attributable to the disease. “Treatment” as used herein covers any treatment of a disease in a mammal, particularly a human, and includes: (a) preventing the disease or symptom from occurring in a subject which may be predisposed to the disease or symptom but has not yet been diagnosed as having it; (b) inhibiting the disease symptom, i.e., arresting its development; or (c) relieving the disease symptom, i.e., causing regression of the disease or symptom.

[0299] An “effective amount” is an amount sufficient to effect beneficial or desired results, including clinical results. An effective amount can be administered in one or more administrations.

[0300] A “cell sample” encompasses a variety of sample types obtained from an individual and can be used in a diagnostic or monitoring assay. The definition encompasses blood and other liquid samples of biological origin, solid tissue samples such as a biopsy specimen or tissue cultures or cells derived therefrom, and the progeny thereof. The definition also includes samples that have been manipulated in any way after their procurement, such as by treatment with reagents, solubilization, or enrichment for certain components, such as proteins or polynucleotides. The term “cell sample” encompasses a clinical sample, and also includes cells in culture, cell supernatants, cell lysates, serum, plasma, biological fluid, and tissue samples.

[0301] As used herein, the terms “neoplastic cells”, “neoplasia”, “tumor”, “tumor cells”, “cancer” and “cancer cells”, (used interchangeably) refer to cells which exhibit relatively autonomous growth, so that they exhibit an aberrant growth phenotype characterized by a significant loss of control of cell proliferation (i.e., de-regulated cell division). Neoplastic cells can be malignant or benign.

[0302] The terms “individual,” “subject,” “host,” and “patient,” are used interchangeably herein and refer to any mammalian subject for whom diagnosis, treatment, or therapy is desired, particularly humans. Other subjects may include cattle, dogs, cats, guinea pigs, rabbits, rats, mice, horses, and so on. Examples of conditions that can be detected/diagnosed in accordance with these methods include cancers. Polynucleotides corresponding to genes that exhibit the appropriate expression pattern can be used to detect cancer in a subject. For a review of markers of cancer, see, e.g., Hanahan et al. Cell 100:57-70 (2000).

[0303] One detection/diagnostic method comprises: (a) obtaining from a mammal (e.g., a human) a biological sample, (b) detecting the presence in the sample of a CA protein and (c) comparing the amount of product present with that in a control sample. In accordance with this method, the presence in the sample of elevated levels of a CA gene product indicates that the subject has a neoplastic or preneoplastic condition.

[0304] Biological samples suitable for use in this method include biological fluids such as serum, plasma, pleural effusions, urine and cerebro-spinal fluid, CSF, tissue samples (e.g., mammary tumor or prostate tissue slices) can also be used in the method of the invention, including samples derived from biopsies. Cell cultures or cell extracts derived, for example, from tissue biopsies can also be used.

[0305] The compound is preferably a binding protein, e.g., an antibody, polyclonal or monoclonal, or antigen binding fragment thereof, which can be labeled with a detectable marker (e.g., fluorophore, chromophore or isotope, etc). Where appropriate, the compound can be attached to a solid support such as a bead, plate, filter, resin, etc. Determination of formation of the complex can be effected by contacting the complex with a further compound (e.g., an antibody) that specifically binds to the first compound (or complex). Like the first compound, the further compound can be attached to a solid support and/or can be labeled with a detectable marker.

[0306] The identification of elevated levels of CA protein in accordance with the present invention makes possible the identification of subjects (patients) that are likely to benefit from adjuvant therapy. For example, a biological sample from a post primary therapy subject (e.g., subject having undergone surgery) can be screened for the presence of circulating CA protein, the presence of elevated levels of the protein, determined by studies of normal populations, being indicative of residual tumor tissue. Similarly, tissue from the cut site of a surgically removed tumor can be examined (e.g., by immunofluorescence), the presence of elevated levels of product (relative to the surrounding tissue) being indicative of incomplete removal of the tumor. The ability to identify such subjects makes it possible to tailor therapy to the needs of the particular subject. Subjects undergoing non-surgical therapy, e.g., chemotherapy or radiation therapy, can also be monitored, the presence in samples from such subjects of elevated levels of CA protein being indicative of the need for continued treatment. Staging of the disease (for example, for purposes of optimizing treatment regimens) can also be effected, for example, by biopsy e.g., with antibody specific for a CA protein.

(g) Animal Models and Transgenics

[0307] In another preferred embodiment CA genes find use in generating animal models of cancers, particularly lymphomas and carcinomas. As is appreciated by one of ordinary skill in the art, when the CA gene identified is repressed or diminished in CA tissue, gene therapy technology wherein antisense RNA directed to the CA gene will also diminish or repress expression of the gene. An animal generated as such serves as an animal model of CA that finds use in screening bioactive drug candidates. Similarly, gene knockout technology, for example as a result of homologous recombination with an appropriate gene targeting vector, will result in the absence of the CA protein. When desired, tissue-specific expression or knockout of the CA protein may be necessary.

[0308] It is also possible that the CA protein is overexpressed in cancer. As such, transgenic animals can be generated that overexpress the CA protein. Depending on the desired expression level, promoters of various strengths can be employed to express the transgene. Also, the number of copies of the integrated transgene can be determined and compared for a determination of the expression level of the transgene. Animals generated by such methods find use as animal models of CA and are additionally useful in screening for bioactive molecules to treat cancer.

Characterization of CA sequences

[0309] The CA nucleic acid sequences of the invention are depicted in Tables 1-15. The sequences in each Table include genomic DNA sequence (mouse genomic sequences mDxx-yyy; human genomic sequences hDxx-yyy), sequence corresponding to the mRNA(s) generated therefrom (mRxx-yyy; hRxx-yyy) and amino acid sequences of the proteins (mPxx-yyy; hPxx-yyy) encoded by the mRNA for both mouse and human genes. N/A indicates a gene that has been identified, but for which there has not been a name ascribed.

[0310] The mouse and human genomic DNA sequence, sequence corresponding to the mRNA(s) generated therefrom and amino acid sequences of the proteins as shown in Tables 1-15 are described according to SEQ ID NOS as follows in Table 16.

TABLE 16

| DESIGNATION | SEQ ID NO: | TYPE OF SEQUENCE |
|---|---|---|
| mD19-0002 | SEQ ID NO:1 | MOUSE GENOMIC SEQUENCE |
| mR19-0002.1 | SEQ ID NO:2 | MOUSE mRNA SEQUENCE |
| mP19-0002.1 | SEQ ID NO:3 | MOUSE PROTEIN SEQUENCE |
| hD19-0002 | SEQ ID NO:4 | HUMAN GENOMIC SEQUENCE |
| hR19-0002.1 | SEQ ID NO:5 | HUMAN mRNA SEQUENCE |
| hP19-0002.1 | SEQ ID NO:6 | HUMAN PROTEIN SEQUENCE |
| hR19-0002.2 | SEQ ID NO:7 | HUMAN mRNA SEQUENCE |
| hP19-0002.2 | SEQ ID NO:8 | HUMAN PROTEIN SEQUENCE |
| hR19-0002.3 | SEQ ID NO:9 | HUMAN mRNA SEQUENCE |
| hP19-0002.3 | SEQ ID NO:10 | HUMAN PROTEIN SEQUENCE |
| mD19-0006 | SEQ ID NO:11 | MOUSE GENOMIC SEQUENCE |
| mR19-0006.1 | SEQ ID NO:12 | MOUSE mRNA SEQUENCE |
| mP19-0006.1 | SEQ ID NO:13 | MOUSE PROTEIN SEQUENCE |
| mR19-0006.2 | SEQ ID NO:14 | MOUSE mRNA SEQUENCE |
| mP19-0006.2 | SEQ ID NO:15 | MOUSE PROTEIN SEQUENCE |
| hD19-0006 | SEQ ID NO:16 | HUMAN GENOMIC SEQUENCE |
| hR19-0006.1 | SEQ ID NO:17 | HUMAN mRNA SEQUENCE |
| hP19-0006.1 | SEQ U) NO:18 | HUMAN PROTEIN SEQUENCE |
| hR19-0006.2 | SEQ ID NO:19 | HUMAN mRNA SEQUENCE |
| hP19-0006.2 | SEQ ID NO:20 | HUMAN PROTEIN SEQUENCE |
| mD20-0001 | SEQ ID NO:21 | MOUSE GENOMIC SEQUENCE |
| mR20-0001.1 | SEQ ID NO:22 | MOUSE mRNA SEQUENCE |
| mP20-0001.1 | SEQ ID NO:23 | MOUSE PROTEIN SEQUENCE |
| mR20-0001.2 | SEQ ID NO:24 | MOUSE mRNA SEQUENCE |
| mP20-0001.2 | SEQ ID NO:25 | MOUSE PROTEIN SEQUENCE |
| hD20-0001 | SEQ ID NO:26 | HUMAN GENOMIC SEQUENCE |
| hR20-0001.1 | SEQ ID NO:27 | HUMAN mRNA SEQUENCE |
| hP20-0001.1 | SEQ ID NO:28 | HUMAN PROTEIN SEQUENCE |
| hR20-0001.2 | SEQ ID NO:29 | HUMAN mRNA SEQUENCE |
| hP20-0001.2 | SEQ ID NO:30 | HUMAN PROTEIN SEQUENCE |
| mD20-0004 | SEQ ID NO:31 | MOUSE GENOMIC SEQUENCE |
| mR20-0004.1 | SEQ ID NO:32 | MOUSE mRNA SEQUENCE |
| mP20-0004.1 | SEQ ID NO:33 | MOUSE PROTEIN SEQUENCE |
| hD20-0004 | SEQ ID NO:34 | HUMAN GENOMIC SEQUENCE |
| hR20-0004.1 | SEQ ID NO:35 | HUMAN mRNA SEQUENCE |
| hP20-0004.1 | SEQ ID NO:36 | HUMAN PROTEIN SEQUENCE |
| hR20-0004.2 | SEQ ID NO:37 | HUMAN mRNA SEQUENCE |
| hP20-0004.2 | SEQ ID NO:38 | HUMAN PROTEIN SEQUENCE |
| mD20-0007 | SEQ ID NO:39 | MOUSE GENOMIC SEQUENCE |
| mR20-0007.1 | SEQ ID NO:40 | MOUSE mRNA SEQUENCE |
| mP20-0007.1 | SEQ ID NO:41 | MOUSE PROTEIN SEQUENCE |
| hD20-0007 | SEQ ID NO:42 | HUMAN GENOMIC SEQUENCE |
| hR20-0007.1 | SEQ ID NO:43 | HUMAN mRNA SEQUENCE |
| hP20-0007.1 | SEQ ID NO:44 | HUMAN PROTEIN SEQUENCE |
| hR20-00072 | SEQ ID NO:45 | HUMAN mRNA SEQUENCE |
| hP20-0007.2 | SEQ ID NO:46 | HUMAN PROTEIN SEQUENCE |
| hR20-0007.3 | SEQ ID NO:47 | HUMAN mRNA SEQUENCE |
| hP20-0007.3 | SEQ ID NO:48 | HUMAN PROTEIN SEQUENCE |
| hR20-0007.4 | SEQ ID NO:49 | HUMAN mRNA SEQUENCE |
| hP20-0007.4 | SEQ ID NO:50 | HUMAN PROTEIN SEQUENCE |
| mD20-001 1 | SEQ ID NO:51 | MOUSE GENOMIC SEQUENCE |
| mR20-0011.1 | SEQ ID NO:52 | MOUSE mRNA SEQUENCE |
| mP20-0011.1 | SEQ ID NO:53 | MOUSE PROTEIN SEQUENCE |
| hD20-0011 | SEQ ID NO:54 | HUMAN GENOMIC SEQUENCE |
| hR20-0011.1 | SEQ ID NO:55 | HUMAN mRNA SEQUENCE |
| hP20-0011.1 | SEQ ID NO:56 | HUMAN PROTEIN SEQUENCE |
| hR20-0011.2 | SEQ ID NO:57 | HUMAN mRNA SEQUENCE |
| hP20-0011.2 | SEQ ID NO:58 | HUMAN PROTEIN SEQUENCE |
| hR20-0011.3 | SEQ ID NO:59 | HUMAN mRNA SEQUENCE |
| hP20-0011.3 | SEQ ID NO:60 | HUMAN PROTEIN SEQUENCE |
| hR20-0011.4 | SEQ ID NO:61 | HUMAN mRNA SEQUENCE |
| hP20-0011.4 | SEQ ID NO:62 | HUMAN PROTEIN SEQUENCE |
| hR20-0011.5 | SEQ ID NO:63 | HUMAN mRNA SEQUENCE |
| hP20-0011.5 | SEQ ID NO:64 | HUMAN PROTEIN SEQUENCE |
| mD20-0018 | SEQ ID NO:65 | MOUSE GENOMIC SEQUENCE |
| mR20-0018.1 | SEQ ID NO:66 | MOUSE mRNA SEQUENCE |
| mP20-0018.1 | SEQ ID NO:67 | MOUSE PROTEIN SEQUENCE |
| mR20-0018.2 | SEQ ID NO:68 | MOUSE mRNA SEQUENCE |
| mP20-0018.2 | SEQ ID NO:69 | MOUSE PROTEIN SEQUENCE |
| hD20-0018 | SEQ ID NO:70 | HUMAN GENOMIC SEQUENCE |
| hR20-0O18.1 | SEQ ID NO:71 | HUMAN mRNA SEQUENCE |
| hP20-0018.1 | SEQ ID NO:72 | HUMAN PROTEIN SEQUENCE |
| hR20-0018.2 | SEQ ID NO:73 | HUMAN mRNA SEQUENCE |
| hP20-0018.2 | SEQ ID NO:74 | HUMAN PROTEIN SEQUENCE |
| hR20-0018.3 | SEQ ID NO:75 | HUMAN mRNA SEQUENCE |
| hP20-0018.3 | SEQ ID NO:76 | HUMAN PROTEIN SEQUENCE |
| mD20-0021 | SEQ ID NO:77 | MOUSE GENOMIC SEQUENCE |
| mR20-0021.1 | SEQ ID NO:78 | MOUSE mRNA SEQUENCE |
| mP20-0021.1 | SEQ ID NO:79 | MOUSE PROTEIN SEQUENCE |
| hD20-0021 | SEQ ID NO:80 | HUMAN GENOMIC SEQUENCE |
| hR20-0021.1 | SEQ ID NO:81 | HUMAN mRNA SEQUENCE |
| hP20-0021.1 | SEQ ID NO:82 | HUMAN PROTEIN SEQUENCE |
| hR20-0021.2 | SEQ ID NO:83 | HUMAN mRNA SEQUENCE |
| hP20-0021.2 | SEQ ID NO:84 | HUMAN PROTEIN SEQUENCE |
| hR20-0021.3 | SEQ ID NO:85 | HUMAN mRNA SEQUENCE |
| hP20-0021.3 | SEQ ID NO:86 | HUMAN PROTEIN SEQUENCE |
| hR20-0021.4 | SEQ ID NO:87 | HUMAN mRNA SEQUENCE |
| hP20-0021.4 | SEQ ID NO:88 | HUMAN PROTEIN SEQUENCE |
| mD20-0027 | SEQ ID NO:89 | MOUSE GENOMIC SEQUENCE |
| mR20-0027.1 | SEQ ID NO:90 | MOUSE mRNA SEQUENCE |
| mP20-0027.1 | SEQ ID NO:91 | MOUSE PROTEIN SEQUENCE |
| hD20-0027 | SEQ ID NO:92 | HUMAN GENOMIC SEQUENCE |
| hR20-0027.1 | SEQ ID NO:93 | HUMAN mRNA SEQUENCE |
| hP20-0027.1 | SEQ ID NO:94 | HUMAN PROTEIN SEQUENCE |
| mD20-0030 | SEQ ID NO:95 | MOUSE GENOMIC SEQUENCE |
| mR20-0030.1 | SEQ ID NO:96 | MOUSE mRNA SEQUENCE |
| mP20-0030.1 | SEQ ID NO:97 | MOUSE PROTEIN SEQUENCE |
| mR20-0030.2 | SEQ ID NO:98 | MOUSE mRNA SEQUENCE |
| mP20-0030.2 | SEQ ID NO:99 | MOUSE PROTEIN SEQUENCE |
| mR20-0030.3 | SEQ ID NO:100 | MOUSE mRNA SEQUENCE |
| mP20-0030.3 | SEQ ID NO:101 | MOUSE PROTEIN SEQUENCE |
| mR20-0030.4 | SEQ ID NO:102 | MOUSE mRNA SEQUENCE |
| mP20-0030.4 | SEQ ID NO:103 | MOUSE PROTEIN SEQUENCE |
| mR20-0030.5 | SEQ ID NO:104 | MOUSE mRNA SEQUENCE |
| mP20-0030.5 | SEQ ID NO:105 | MOUSE PROTEIN SEQUENCE |
| mR20-0030.6 | SEQ ID NO:106 | MOUSE mRNA SEQUENCE |
| mP20-0030.6 | SEQ ID NO:107 | MOUSE PROTEIN SEQUENCE |
| hD20-0030 | SEQ ID NO:108 | HUMAN GENOMIC SEQUENCE |
| hR20-0030.1 | SEQ ID NO:109 | HUMAN mRNA SEQUENCE |
| hP20-0030.1 | SEQ ID NO:110 | HUMAN PROTEIN SEQUENCE |
| mD21-012 | SEQ ID NO:111 | MOUSE GENOMIC SEQUENCE |
| mR21-012.1 | SEQ ID NO:112 | MOUSE mRNA SEQUENCE |
| mP21-012.1 | SEQ ID NO:113 | MOUSE PROTEIN SEQUENCE |
| hD21-012 | SEQ ID NO:114 | HUMAN GENOMIC SEQUENCE |
| hR21-012.1 | SEQ ID NO:115 | HUMAN mRNA SEQUENCE |
| hP21-012.1 | SEQ ID NO:116 | HUMAN PROTEIN SEQUENCE |
| mD21-017 | SEQ ID NO:117 | MOUSE GENOMIC SEQUENCE |
| mR21-017.1 | SEQ ID NO:118 | MOUSE mRNA SEQUENCE |
| mP21-017.1 | SEQ ID NO:119 | MOUSE PROTEIN SEQUENCE |
| hD21-017 | SEQ ID NO:120 | HUMAN GENOMIC SEQUENCE |
| hR21-017.1 | SEQ ID NO:121 | HUMAN mRNA SEQUENCE |
| hP21-017.1 | SEQ ID NO:122 | HUMAN PROTEIN SEQUENCE |
| hR21-017.2 | SEQ ID NO:123 | HUMAN mRNA SEQUENCE |
| hP21-017.2 | SEQ ID NO:124 | HUMAN PROTEIN SEQUENCE |
| hR21-017.3 | SEQ ID NO:125 | HUMAN mRNA SEQUENCE |
| hP21-017.3 | SEQ ID NO:126 | HUMAN PROTEIN SEQUENCE |
| mD21-021 | SEQ ID NO:127 | MOUSE GENOMIC SEQUENCE |
| mR21-021.1 | SEQ ID NO:128 | MOUSE mRNA SEQUENCE |
| mP21-021.1 | SEQ ID NO:129 | MOUSE PROTEIN SEQUENCE |
| hD21-021 | SEQ ID NO:130 | HUMAN GENOMIC SEQUENCE |
| hR21-021.1 | SEQ ID NO:131 | HUMAN mRNA SEQUENCE |
| hP21-021.1 | SEQ ID NO:132 | HUMAN PROTEIN SEQUENCE |
| hR21-021.2 | SEQ ID NO:133 | HUMAN mRNA SEQUENCE |
| hP21-021.2 | SEQ ID NO:134 | HUMAN PROTEIN SEQUENCE |
| hR21-021.3 | SEQ ID NO:135 | HUMAN mRNA SEQUENCE |
| hP21-021.3 | SEQ ID NO:136 | HUMAN PROTEIN SEQUENCE |
| hR21-021.4 | SEQ ID NO:137 | HUMAN mRNA SEQUENCE |
| hP21-021.4 | SEQ ID NO:138 | HUMAN PROTEIN SEQUENCE |
| mD21-026 | SEQ ID NO:139 | MOUSE GENOMIC SEQUENCE |
| mR21-026.1 | SEQ ID NO:140 | MOUSE mRNA SEQUENCE |
| mP21-026.1 | SEQ ID NO:141 | MOUSE PROTEIN SEQUENCE |
| hD21-026 | SEQ ID NO:142 | HUMAN GENOMIC SEQUENCE |
| hR21-026.1 | SEQ ID NO:143 | HUMAN mRNA SEQUENCE |
| hP21-026.1 | SEQ ID NO:144 | HUMAN PROTEIN SEQUENCE |
| mD21-032 | SEQ ID NO:145 | MOUSE GENOMIC SEQUENCE |
| mR21-032.1 | SEQ ID NO:146 | MOUSE mRNA SEQUENCE |
| mP21-032.1 | SEQ ID NO:147 | MOUSE PROTEIN SEQUENCE |
| hD21-032 | SEQ ID NO:148 | HUMAN GENOMIC SEQUENCE |
| hR21-032.1 | SEQ ID NO:149 | HUMAN mRNA SEQUENCE |
| hP21-032.1 | SEQ ID NO:150 | HUMAN PROTEIN SEQUENCE |
| hR21-032.2 | SEQ ID NO:151 | HUMAN mRNA SEQUENCE |
| hP21-032.2 | SEQ ID NO:152 | HUMAN PROTEIN SEQUENCE |
| hR21-032.3 | SEQ ID NO:153 | HUMAN mRNA SEQUENCE |
| hP21-032.3 | SEQ ID NO:154 | HUMAN PROTEIN SEQUENCE |
| hR21-032.4 | SEQ ID NO:155 | HUMAN mRNA SEQUENCE |
| hP21-032.4 | SEQ ID NO:156 | HUMAN PROTEIN SEQUENCE |
| hR21-032.5 | SEQ ID NO:157 | HUMAN mRNA SEQUENCE |
| hP21-032.5 | SEQ ID NO:158 | HUMAN PROTEIN SEQUENCE |
| hR21-032.6 | SEQ ID NO:159 | HUMAN mRNA SEQUENCE |
| hP21-032.6 | SEQ ID NO:160 | HUMAN PROTEIN SEQUENCE |
| hR21-032.7 | SEQ ID NO:161 | HUMAN mRNA SEQUENCE |
| hP21-032.7 | SEQ ID NO:162 | HUMAN PROTEIN SEQUENCE |
| hR21-032.8 | SEQ ID NO:163 | HUMAN mRNA SEQUENCE |
| hP21-032.8 | SEQ ID NO:164 | HUMAN PROTEIN SEQUENCE |
| hR21-032.9 | SEQ ID NO:165 | HUMAN mRNA SEQUENCE |
| hP21-032.9 | SEQ ID NO:166 | HUMAN PROTEIN SEQUENCE |
| hR21-032.10 | SEQ ID NO:167 | HUMAN mRNA SEQUENCE |
| hP21-032.10 | SEQ ID NO:168 | HUMAN PROTEIN SEQUENCE |

[0311] The CA sequences were analyzed by Panther™ (Molecular Diagnostics, Palo Alto, Calif.) software designed to detect homologs and enable prediction of molecular function through a system for protein functional classification. Human Gene Ontlogy annotations were prepared in accordance with the Gene Ontology Consortium (Gene Ontology: tool for the unification of biology. The Gene Ontology Consortium Nature Genet. 25: 25-29 (2000)). Similar analysis was carried out by determining IPR information regarding the CA polypeptides from InterPro, which is an integrated documentation resource for protein families, domains and functional sites (Apweiler at al. Bioinformatics 16(12):1145-1150 (2000)).

[0312] The CA sequences may be classified according to the following predicted general classifications of function by Panther™ analysis, human gene ontology and IPR domain information for polypeptides having SEQ ID NOS: 6, 8, 10, 18, 20, 28, 30, 36, 38, 44, 46, 48, 50, 56, 58, 60, 62, 64, 72, 74, 76, 82, 84, 86, 88, 94, 110, 116, 122, 124, 126, 132, 134, 136, 138, 144, 150, 152, 154, 156, 158, 160, 162, 164, 166, and 168 as shown in Tables 1-15. The classifications are shown in Table 17 below.

TABLE 17

| HUMAN | | |
|---|---|---|
| PROTEIN | SEQUENCE | CLASSIFICATION |
| hP19-0002.1 | SEQ ID NO: 6 | HUMAN PANTHER CLASSIFICATIONS |
| | | FAMILY (SUBFAMILY) |
| | | GLUTAMATE RECEPTOR- |
| | | RELATED(GLUTAMATE RECEPTOR DELTA CHAIN) |
| | | HUMAN GENE ONTOLOGY |
| | | No Gene Ontology |
| | | HUMAN PROTEIN DOMAINS (INTERPRO |
| | | SIGNATURES) |
| | | No Domain Hit |
| hP19-0002.2 | SEQ ID NO: 8 | HUMAN PANTHER CLASSIFICATIONS |
| | | FAMILY (SUBFAMILY) |
| | | GLUTAMATE RECEPTOR- |
| | | RELATED(GLUTAMATE RECEPTOR DELTA CHAIN) |
| | | HUMAN GENE ONTOLOGY |
| | | No Gene Ontology |
| | | HUMAN PROTEIN DOMAINS (INTERPRO |
| | | SIGNATURES) |
| | | No Domain Hit |
| hP19-0002.3 | SEQ ID NO: 10 | HUMAN PANTHER CLASSIFICATIONS |
| | | FAMILY (SUBFAMILY) |
| | | GLUTAMATE RECEPTOR- |
| | | RELATED(GLUTAMATE RECEPTOR DELTA CHAIN) |
| | | HUMAN GENE ONTOLOGY |
| | | No Gene Ontology |
| | | HUMAN PROTEIN DOMAINS (INTERPRO |
| | | SIGNATURES) |
| | | No Domain Hit |
| hP19-0006.1 | SEQ ID NO: 18 | HUMAN PANTHER CLASSIFICATIONS |
| | | FAMILY (SUBFAMILY) |
| | | INTERLEUKIN-16- |
| | | RELATED(INTERLEUKIN-16) |
| | | HUMAN GENE ONTOLOGY |
| | | No Gene Ontology |
| | | HUMAN PROTEIN DOMAINS (INTERPRO |
| | | SIGNATURES) |
| | | No Domain Hit |
| hP19-0006.2 | SEQ ID NO: 20 | HUMAN PANTHER CLASSIFICATIONS |
| | | FAMILY (SUBFAMILY) |
| | | INTERLEUKIN-16- |
| | | RELATED(INTERLEUKIN-16) |
| | | HUMAN GENE ONTOLOGY |
| | | No Gene Ontology |
| | | HUMAN PROTEIN DOMAINS (INTERPRO |
| | | SIGNATURES) |
| | | No Domain Hit |
| hP20-0001.1 | SEQ ID NO: 28 | HUMAN PANTHER CLASSIFICATIONS |
| | | FAMILY (SUBFAMILY) |
| | | LOW-DENSITY LIPOPROTEIN |
| | | RECEPTOR-RELATED(LOW DENSITY LIPOPROTEIN |
| | | RECEPTOR-RELATED) |
| | | BIOLOGICAL PROCESS |
| | | Lipid, fatty acid and steroid |
| | | metabolism(2.03.00.00.00) > Steroid |
| | | metabolism(2.03.02.00.00) > Cholesterol |
| | | metabolism(2.03.02.01.00) |
| | | Intracellular protein traffic(2.13.00.00.00) > Endocytosis |
| | | (2.13.03.00.00) > Receptor mediated |
| | | endocytosis(2.13.03.03.00) |
| | | MOLECULAR FUNCTIONS |
| | | Receptor(1.01.00.00.00) > Other |
| | | receptor(1.01.99.00.00) |
| | | HUMAN GENE ONTOLOGY |
| | | BIOLOGICAL PROCESS |
| | | cell proliferation > positive control of cell |
| | | proliferation |
| | | nucleotide metabolism > lipid metabolism |
| | | cell communication > signal transduction |
| | | learning and memory > memory |
| | | macromolecule catabolism > proteolysis |
| | | and peptidolysis |
| | | MOLECULAR FUNCTION |
| | | protein binding > lipoprotein binding |
| | | receptor > LDL receptor |
| | | ligand binding or carrier > protein binding |
| | | serine-type endopeptidase > trypsin |
| | | peptidase > serine-type peptidase |
| | | CELL COMPONENT |
| | | cell > plasma membrane |
| | | plasma membrane > coated pit |
| | | extracellular matrix > basement membrane |
| | | plasma membrane > integral plasma |
| | | membrane protein |
| | | extracellular > extracellular matrix |
| | | HUMAN PROTEIN DOMAINS (INTERPRO |
| | | SIGNATURES) |
| | | IPR000561 (EGF) |
| | | IPR000033 (LY) |
| | | IPR002172 (LDLa) |
| | | IPR000561 (EGF) |
| | | IPR002172 (ldl recept a) |
| | | IPR000033 (ldl recept b) |
| | | IPR000694 (PRO RICH) |
| | | NULL (CYS RICH) |
| | | IPR002172 (LDLRA 2 3) |
| hP20-0001.2 | SEQ ID NO: 30 | HUMAN PANTHER CLASSIFICATIONS |
| | | FAMILY (SUBFAMILY) |
| | | LOW-DENSITY LIPOPROTEIN |
| | | RECEPTOR-RELATED(LOW DENSITY LIPOPROTEIN |
| | | RECEPTOR-RELATED) |
| | | BIOLOGICAL PROCESS |
| | | Lipid, fatty acid and steroid |
| | | metabolism(2.03.00.00.00) > Steroid |
| | | metabolism(2.03.02.00.00) > Cholesterol |
| | | metabolism(2.03.02.01.00) |
| | | Intracellular protein traffic(2.13.00.00.00) > Endocytosis |
| | | (2.13.03.00.00) > Receptor mediated |
| | | endocytosis(2.13.03.03.00) |
| | | MOLECULAR FUNCTIONS |
| | | Receptor(1.01.00.00.00) > Other |
| | | receptor(1.01.99.00.00) |
| | | HUMAN GENE ONTOLOGY |
| | | BIOLOGICAL PROCESS |
| | | cell proliferation > positive control of cell |
| | | proliferation |
| | | nucleotide metabolism > lipid metabolism |
| | | cell communication > signal transduction |
| | | learning and memory > memory |
| | | macromolecule catabolism > proteolysis |
| | | and peptidolysis |
| | | MOLECULAR FUNCTION |
| | | protein binding > lipoprotein binding |
| | | receptor > LDL receptor |
| | | ligand binding or carrier > protein binding |
| | | serine-type endopeptidase > trypsin |
| | | peptidase > serine-type peptidase |
| | | CELL COMPONENT |
| | | cell > plasma membrane |
| | | plasma membrane > coated pit |
| | | extracellular matrix > basement membrane |
| | | plasma membrane > integral plasma |
| | | membrane protein |
| | | extracellular > extracellular matrix |
| | | HUMAN PROTEIN DOMAINS (INTERPRO |
| | | SIGNATURES) |
| | | IPR000561 (EGF) |
| | | IPR000033 (LY) |
| | | IPR002172 (LDLa) |
| | | IPR000561 (EGF) |
| | | IPR002172 (ldl recept a) |
| | | IPR000033 (ldl recept b) |
| | | IPR000694 (PRO RICH) |
| | | NULL (CYS RICH) |
| | | IPR002172 (LDLRA 2 3) |
| hP20-0004.1 | SEQ ID NO: 36 | HUMAN PANTHER CLASSIFICATIONS |
| | | FAMILY (SUBFAMILY) |
| | | Unclassified |
| | | HUMAN GENE ONTOLOGY |
| | | No Gene Ontology |
| | | HUMAN PROTEIN DOMAINS (INTERPRO |
| | | SIGNATURES) |
| | | No Domain Hit |
| hP20-0004.2 | SEQ ID NO: 38 | HUMAN PANTHER CLASSIFICATIONS |
| | | FAMILY (SUBFAMILY) |
| | | MACROPHAGE SCAVENGER |
| | | RECEPTOR-RELATED(T-CELL SURFACE |
| | | GLYCOPROTEIN CD5) |
| | | BIOLOGICAL PROCESS |
| | | Signal transduction(2.11.00.00.00) > Cell |
| | | communication(2.11.03.00.00) > Cell adhesion-mediated |
| | | signaling(2.11.03.01.00) > Ligand-mediated |
| | | signaling(2.11.03.03.00) |
| | | Immunity and defense(2.16.00.00.00) > T- |
| | | cell mediated immunity(2.16.01.00.00) |
| | | Developmental processes(2.23.00.00.00) > Mesoderm |
| | | development(2.23.10.00.00) > Hematopoesis |
| | | (2.23.10.06.00) |
| | | MOLECULAR FUNCTIONS |
| | | Receptor(1.01.00.00.00) > Other |
| | | receptor(1.01.99.00.00) |
| | | HUMAN GENE ONTOLOGY |
| | | BIOLOGICAL PROCESS |
| | | stress response > defence response |
| | | MOLECULAR FUNCTION |
| | | molecular_function unknown > lymphocyte |
| | | antigen |
| | | CELL COMPONENT |
| | | cell > membrane fraction |
| | | cell > plasma membrane |
| | | HUMAN PROTEIN DOMAINS (INTERPRO |
| | | SIGNATURES) |
| | | IPR003566 (TCELLCD5) |
| | | IPR001190 (SR) |
| | | IPR001190 (SRCR) |
| | | IPR001190 (SRCR 2 3) |
| hP20-0007.1 | SEQ ID NO: 44 | HUMAN PANTHER CLASSIFICATIONS |
| | | FAMILY (SUBFAMILY) |
| | | LOW-DENSITY LIPOPROTEIN |
| | | RECEPTOR-RELATED(VERY LOW-DENSITY |
| | | LIPOPROTEIN RECEPTOR) |
| | | BIOLOGICAL PROCESS |
| | | Lipid, fatty acid and steroid |
| | | metabolism(2.03.00.00.00) > Steroid |
| | | metabolism(2.03.02.00.00) > Cholesterol |
| | | metabolism(2.03.02.01.00) |
| | | Signal transduction(2.11.00.00.00) |
| | | Intracellular protein traffic(2.13.00.00.00) > Endocytosis |
| | | (2.13.03.00.00) > Receptor mediated |
| | | endocytosis(2.13.03.03.00) |
| | | MOLECULAR FUNCTIONS |
| | | Receptor(1.01.00.00.00) > Other |
| | | receptor(1.01.99.00.00) |
| | | HUMAN GENE ONTOLOGY |
| | | BIOLOGICAL PROCESS |
| | | biosynthesis > steroid biosynthesis |
| | | steroid metabolism > steroid biosynthesis |
| | | intracellular protein traffic > endocytosis |
| | | learning and memory > memory |
| | | steroid metabolism > cholesterol |
| | | metabolism |
| | | protein glycosylation > O-linked |
| | | glycosylation |
| | | MOLECULAR FUNCTION |
| | | ligand binding or carrier > calcium binding |
| | | protein binding > lipoprotein binding |
| | | enzyme > lipoprotein lipase |
| | | receptor > LDL receptor |
| | | CELL COMPONENT |
| | | plasma membrane > coated pit |
| | | cell > plasma membrane |
| | | Golgi apparatus > secretory vesicle |
| | | gap junction > connexon |
| | | extracellular matrix > basement membrane |
| | | HUMAN PROTEIN DOMAINS (INTERPRO |
| | | SIGNATURES) |
| | | IPR002172 (LDLRECEPTOR) |
| | | IPR001881 (EGF CA) |
| | | IPR000033 (LY) |
| | | IPR002172 (LDLa) |
| | | IPR002172 (ldl recept a) |
| | | IPR000033 (ldl recept b) |
| | | IPR001881 (EGF CA 2 2) |
| | | NULL (CYS RICH) |
| | | IPR002172 (LDLRA 2 8) |
| hP20-0007.2 | SEQ ID NO: 46 | HUMAN PANTHER CLASSIFICATIONS |
| | | FAMILY (SUBFAMILY) |
| | | LOW-DENSITY LIPOPROTEIN |
| | | RECEPTOR-RELATED(VERY LOW-DENSITY |
| | | LIPOPROTEIN RECEPTOR) |
| | | BIOLOGICAL PROCESS |
| | | Lipid, fatty acid and steroid |
| | | metabolism(2.03.00.00.00) > Steroid |
| | | metabolism(2.03.02.00.00) > Cholesterol |
| | | metabolism(2.03.02.01.00) |
| | | Signal transduction(2.11.00.00.00) |
| | | Intracellular protein traffic(2.13.00.00.00) > Endocytosis |
| | | (2.13.03.00.00) > Receptor mediated |
| | | endocytosis(2.13.03.03.00) |
| | | MOLECULAR FUNCTIONS |
| | | Receptor(1.01.00.00.00) > Other |
| | | receptor(1.01.99.00.00) |
| | | HUMAN GENE ONTOLOGY |
| | | BIOLOGICAL PROCESS |
| | | biosynthesis > steroid biosynthesis |
| | | steroid metabolism > steroid biosynthesis |
| | | intracellular protein traffic > endocytosis |
| | | learning and memory > memory |
| | | protein glycosylation > O-linked |
| | | glycosylation |
| | | steroid metabolism > cholesterol |
| | | metabolism |
| | | MOLECULAR FUNCTION |
| | | ligand binding or carrier > calcium binding |
| | | protein binding > lipoprotein binding |
| | | enzyme > lipoprotein lipase |
| | | receptor > LDL receptor |
| | | CELL COMPONENT |
| | | cell > plasma membrane |
| | | plasma membrane > coated pit |
| | | Golgi apparatus > secretory vesicle |
| | | gap junction > connexon |
| | | extracellular matrix > basement membrane |
| | | HUMAN PROTEIN DOMAINS (INTERPRO |
| | | SIGNATURES) |
| | | IPR002172 (LDLRECEPTOR) |
| | | IPR001881 (EGF CA) |
| | | IPR000033 (LY) |
| | | IPR002172 (LDLa) |
| | | IPR002172 (ldl recept a) |
| | | IPR000033 (ldl recept b) |
| | | IPR001881 (EGF CA 2 2) |
| | | NULL (CYS RICH) |
| | | IPR002172 (LDLRA 2 8) |
| hP20-0007.3 | SEQ ID NO: 48 | HUMAN PANTHER CLASSIFICATIONS |
| | | FAMILY (SUBFAMILY) |
| | | LOW-DENSITY LIPOPROTEIN |
| | | RECEPTOR-RELATED(VERY LOW-DENSITY |
| | | LIPOPROTEIN RECEPTOR) |
| | | BIOLOGICAL PROCESS |
| | | Lipid, fatty acid and steroid |
| | | metabolism(2.03.00.00.00) > Steroid |
| | | metabolism(2.03.02.00.00) > Cholesterol |
| | | metabolism(2.03.02.01.00) |
| | | Signal transduction(2.11.00.00.00) |
| | | Intracellular protein traffic(2.13.00.00.00) > Endocytosis |
| | | (2.13.03.00.00) > Receptor mediated |
| | | endocytosis(2.13.03.03.00) |
| | | MOLECULAR FUNCTIONS |
| | | Receptor(1.01.00.00.00) > Other |
| | | receptor(1.01.99.00.00) |
| | | HUMAN GENE ONTOLOGY |
| | | BIOLOGICAL PROCESS |
| | | biosynthesis > steroid biosynthesis |
| | | steroid metabolism > steroid biosynthesis |
| | | intracellular protein traffic > endocytosis |
| | | learning and memory > memory |
| | | steroid metabolism > cholesterol |
| | | metabolism |
| | | protein glycosylation > O-linked |
| | | glycosylation |
| | | MOLECULAR FUNCTION |
| | | ligand binding or carrier > calcium binding |
| | | protein binding > lipoprotein binding |
| | | enzyme > lipoprotein lipase |
| | | receptor > LDL receptor |
| | | CELL COMPONENT |
| | | plasma membrane > coated pit |
| | | cell > plasma membrane |
| | | Golgi apparatus > secretory vesicle |
| | | gap junction > connexon |
| | | extracellular matrix > basement membrane |
| | | HUMAN PROTEIN DOMAINS (INTERPRO |
| | | SIGNATURES) |
| | | IPR002172 (LDLRECEPTOR) |
| | | IPR001881 (EGF CA) |
| | | IPR000033 (LY) |
| | | IPR002172 (LDLa) |
| | | IPR002172 (ldl recept a) |
| | | IPR000033 (ldl recept b) |
| | | IPR001881 (EGF CA 2 2) |
| | | NULL (CYS RICH) |
| | | IPR002172 (LDLRA 2 8) |
| hP20-0007.4 | SEQ ID NO: 50 | HUMAN PANTHER CLASSIFICATIONS |
| | | FAMILY (SUBFAMILY) |
| | | LOW-DENSITY LIPOPROTEIN |
| | | RECEPTOR-RELATED(VERY LOW-DENSITY |
| | | LIPOPROTEIN RECEPTOR) |
| | | BIOLOGICAL PROCESS |
| | | Lipid, fatty acid and steroid |
| | | metabolism(2.03.00.00.00) > Steroid |
| | | metabolism(2.03.02.00.00) > Cholesterol |
| | | metabolism(2.03.02.01.00) |
| | | Signal transduction(2.11.00.00.00) |
| | | Intracellular protein traffic(2.13.00.00.00) > Endocytosis |
| | | (2.13.03.00.00) > Receptor mediated |
| | | endocytosis(2.13.03.03.00) |
| | | MOLECULAR FUNCTIONS |
| | | Receptor(1.01.00.00.00) > Other |
| | | receptor(1.01.99.00.00) |
| | | HUMAN GENE ONTOLOGY |
| | | BIOLOGICAL PROCESS |
| | | biosynthesis > steroid biosynthesis |
| | | steroid metabolism > steroid biosynthesis |
| | | intracellular protein traffic > endocytosis |
| | | learning and memory > memory |
| | | protein glycosylation > O-linked |
| | | glycosylation |
| | | steroid metabolism > cholesterol |
| | | metabolism |
| | | MOLECULAR FUNCTION |
| | | ligand binding or carrier > calcium binding |
| | | protein binding > lipoprotein binding |
| | | enzyme > lipoprotein lipase |
| | | receptor > LDL receptor |
| | | CELL COMPONENT |
| | | cell > plasma membrane |
| | | plasma membrane > coated pit |
| | | Golgi apparatus > secretory vesicle |
| | | gap junction > connexon |
| | | extracellular matrix > basement membrane |
| | | HUMAN PROTEIN DOMAINS (INTERPRO |
| | | SIGNATURES) |
| | | IPR002172 (LDLRECEPTOR) |
| | | IPR001881 (EGF CA) |
| | | IPR000033 (LY) |
| | | IPR002172 (LDLa) |
| | | IPR002172 (ldl recept a) |
| | | IPR000033 (ldl recept b) |
| | | IPR001881 (EGF CA 2 2) |
| | | NULL (CYS RICH) |
| | | IPR002172 (LDLRA 2 8) |
| hP20-0011.1 | SEQ ID NO: 56 | HUMAN PANTHER CLASSIFICATIONS |
| | | FAMILY (SUBFAMILY) |
| | | VASCULAR ATP- |
| | | DIPHOSPHOHYDROLASE-RELATED(VASCULAR |
| | | ATP-DIPHOSPHOHYDROLASE) |
| | | BIOLOGICAL PROCESS |
| | | Nucleoside, nucleotide and nucleic acid |
| | | metabolism(2.04.00.00.00) |
| | | Blood clotting(2.20.00.00.00) |
| | | Apoptosis(2.26.00.00.00) |
| | | MOLECULAR FUNCTIONS |
| | | Phosphatase(1.16.00.00.00) > Nucleotide |
| | | phosphatase(1.16.03.00.00) |
| | | HUMAN GENE ONTOLOGY |
| | | BIOLOGICAL PROCESS |
| | | humoral defense mechanism > antimicrobial |
| | | response |
| | | cell communication > cell adhesion |
| | | cell communication > cell-cell signaling |
| | | MOLECULAR FUNCTION |
| | | enzyme > adenosinetriphosphatase |
| | | enzyme > apyrase |
| | | GO molecular function > cell adhesion |
| | | CELL COMPONENT |
| | | cell > membrane fraction |
| | | cell > plasma membrane |
| | | plasma membrane > integral plasma |
| | | membrane protein |
| | | HUMAN PROTEIN DOMAINS (INTERPRO |
| | | SIGNATURES) |
| | | IPR000407 (GDA1 CD39) |
| hP20-0011.2 | SEQ ID NO: 58 | HUMAN PANTHER CLASSIFICATIONS |
| | | FAMILY (SUBFAMILY) |
| | | VASCULAR ATP- |
| | | DIPHOSPHOHYDROLASE-RELATED(VASCULAR |
| | | ATP-DIPHOSPHOHYDROLASE) |
| | | BIOLOGICAL PROCESS |
| | | Nucleoside, nucleotide and nucleic acid |
| | | metabolism(2.04.00.00.00) |
| | | Blood clotting(2.20.00.00.00) |
| | | Apoptosis(2.26.00.00.00) |
| | | MOLECULAR FUNCTIONS |
| | | Phosphatase(1.16.00.00.00) > Nucleotide |
| | | phosphatase(1.16.03.00.00) |
| | | HUMAN GENE ONTOLOGY |
| | | BIOLOGICAL PROCESS |
| | | humoral defense mechanism > antimicrobial |
| | | response |
| | | cell communication > cell adhesion |
| | | cell communication > cell-cell signaling |
| | | MOLECULAR FUNCTION |
| | | enzyme > adenosinetriphosphatase |
| | | enzyme > apyrase |
| | | GO molecular function > cell adhesion |
| | | CELL COMPONENT |
| | | cell > membrane fraction |
| | | cell > plasma membrane |
| | | plasma membrane > integral plasma |
| | | membrane protein |
| | | HUMAN PROTEIN DOMAINS (INTERPRO |
| | | SIGNATURES) |
| | | IPR000407 (GDA1 CD39) |
| hP20-0011.3 | SEQ ID NO: 60 | HUMAN PANTHER CLASSIFICATIONS |
| | | FAMILY (SUBFAMILY) |
| | | VASCULAR ATP- |
| | | DIPHOSPHOHYDROLASE-RELATED(VASCULAR |
| | | ATP-DIPHOSPHOHYDROLASE) |
| | | BIOLOGICAL PROCESS |
| | | Nucleoside, nucleotide and nucleic acid |
| | | metabolism(2.04.00.00.00) |
| | | Blood clotting(2.20.00.00.00) |
| | | Apoptosis(2.26.00.00.00) |
| | | MOLECULAR FUNCTIONS |
| | | Phosphatase(1.16.00.00.00) > Nucleotide |
| | | phosphatase(1.16.03.00.00) |
| | | HUMAN GENE ONTOLOGY |
| | | BIOLOGICAL PROCESS |
| | | humoral defense mechanism > antimicrobial |
| | | response |
| | | cell communication > cell adhesion |
| | | cell communication > cell-cell signaling |
| | | MOLECULAR FUNCTION |
| | | enzyme > adenosinetriphosphatase |
| | | enzyme > apyrase |
| | | GO molecular function > cell adhesion |
| | | CELL COMPONENT |
| | | cell > membrane fraction |
| | | cell > plasma membrane |
| | | plasma membrane > integral plasma |
| | | membrane protein |
| | | HUMAN PROTEIN DOMAINS (INTERPRO |
| | | SIGNATURES) |
| | | IPR000407 (GDA1 CD39) |
| hP20-0011.4 | SEQ ID NO: 62 | HUMAN PANTHER CLASSIFICATIONS |
| | | FAMILY (SUBFAMILY) |
| | | VASCULAR ATP- |
| | | DIPHOSPHOHYDROLASE-RELATED(VASCULAR |
| | | ATP-DIPHOSPHOHYDROLASE) |
| | | BIOLOGICAL PROCESS |
| | | Nucleoside, nucleotide and nucleic acid |
| | | metabolism(2.04.00.00.00) |
| | | Blood clotting(2.20.00.00.00) |
| | | Apoptosis(2.26.00.00.00) |
| | | MOLECULAR FUNCTIONS |
| | | Phosphatase(1.16.00.00.00) > Nucleotide |
| | | phosphatase(1.16.03.00.00) |
| | | HUMAN GENE ONTOLOGY |
| | | BIOLOGICAL PROCESS |
| | | humoral defense mechanism > antimicrobial |
| | | response |
| | | cell communication > cell adhesion |
| | | cell communication > cell-cell signaling |
| | | MOLECULAR FUNCTION |
| | | enzyme > adenosinetriphosphatase |
| | | enzyme > apyrase |
| | | GO molecular function > cell adhesion |
| | | CELL COMPONENT |
| | | cell > membrane fraction |
| | | cell > plasma membrane |
| | | plasma membrane > integral plasma |
| | | membrane protein |
| | | HUMAN PROTEIN DOMAINS (INTERPRO |
| | | SIGNATURES) |
| | | IPR000407 (GDA1 CD39) |
| hP20-0011.5 | SEQ ID NO: 64 | HUMAN PANTHER CLASSIFICATIONS |
| | | FAMILY (SUBFAMILY) |
| | | VASCULAR ATP- |
| | | DIPHOSPHOHYDROLASE-RELATED(VASCULAR |
| | | ATP-DIPHOSPHOHYDROLASE) |
| | | BIOLOGICAL PROCESS |
| | | Nucleoside, nucleotide and nucleic acid |
| | | metabolism(2.04.00.00.00) |
| | | Blood clotting(2.20.00.00.00) |
| | | Apoptosis(2.26.00.00.00) |
| | | MOLECULAR FUNCTIONS |
| | | Phosphatase(1.16.00.00.00) > Nucleotide |
| | | phosphatase(1.16.03.00.00) |
| | | HUMAN GENE ONTOLOGY |
| | | BIOLOGICAL PROCESS |
| | | humoral defense mechanism > antimicrobial |
| | | response |
| | | cell communication > cell adhesion |
| | | cell communication > cell-cell signaling |
| | | MOLECULAR FUNCTION |
| | | enzyme > adenosinetriphosphatase |
| | | enzyme > apyrase |
| | | GO molecular function > cell adhesion |
| | | CELL COMPONENT |
| | | cell > membrane fraction |
| | | cell > plasma membrane |
| | | plasma membrane > integral plasma |
| | | membrane protein |
| | | HUMAN PROTEIN DOMAINS (INTERPRO |
| | | SIGNATURES) |
| | | IPR000407 (GDA1 CD39) |
| hP20-0018.1 | SEQ ID NO: 72 | HUMAN PANTHER CLASSIFICATIONS |
| | | FAMILY (SUBFAMILY) |
| | | PROTEIN TYROSINE |
| | | KlNASE(PLATELET-DERIVED GROWTH FACTOR |
| | | RECEPTOR (PTK GROUP XIV)) |
| | | BIOLOGICAL PROCESS |
| | | Proten metabolism and |
| | | modification(2.05.00.00.00) > Protein |
| | | modification(2.05.03.00.00) > Protein |
| | | phosphorylation(2.05.03.01.00) |
| | | Signal transduction(2.11.00.00.00) > Cell |
| | | surface receptor mediated signal |
| | | transduction(2.11.01.00.00) > Receptor protein tyrosine |
| | | kinase signaling pathway(2.11.01.03.00) |
| | | MOLECULAR FUNCTIONS |
| | | Receptor(1.01.00.00.00) > Protein kinase |
| | | receptor(1.01.06.00.00) |
| | | Kinase(1.15.00.00.00) > Protein |
| | | kinase(1.15.01.00.00) > Tyrosine protein kinase |
| | | receptor(1.15.01.01.00) |
| | | HUMAN GENE ONTOLOGY |
| | | MOLECULAR FUNCTION |
| | | transmembrane receptor protein tyrosine |
| | | kinase > platelet-derived growth factor receptor |
| | | transmembrane receptor protein tyrosine |
| | | kinase > fibroblast growth factor receptor |
| | | transmembrane receptor protein tyrosine |
| | | kinase > hepatocyte growth factor receptor |
| | | CELL COMPONENT |
| | | cell > membrane fraction |
| | | plasma membrane > integral plasma |
| | | membrane protein |
| | | Golgi apparatus > Golgi membrane |
| | | plasma membrane > peripheral plasma |
| | | membrane protein |
| | | intercellular junction > adherens junction |
| | | HUMAN PROTEIN DOMAINS (INTERPRO |
| | | SIGNATURES) |
| | | IPR001245 (TyrKc) |
| | | IPR002290 (S TKc) |
| | | IPR003598 (IGc2) |
| | | IPR003599 (IG) |
| | | IPR000719 (pkinase) |
| | | IPR003006 (ig) |
| | | IPR000719 (PROTEIN KINASE DOM) |
| | | IPR000719 (sp P09619 PGDR HUMAN) |
| hP20-0018.2 | SEQ ID NO: 74 | HUMAN PANTHER CLASSIFICATIONS |
| | | FAMILY (SUBFAMILY) |
| | | Unclassified |
| | | HUMAN GENE ONTOLOGY |
| | | BIOLOGICAL PROCESS |
| | | protein modification > protein |
| | | phosphorylation |
| | | protein modification > protein |
| | | dephosphorylation |
| | | enzyme linked receptor protein signaling |
| | | pathway > transmembrane receptor protein tyrosine kinase |
| | | signaling pathway |
| | | MOLECULAR FUNCTION |
| | | defense/immunity protein > immunoglobulin |
| | | B cell receptor > immunoglobulin |
| | | enzyme > protein kinase |
| | | protein kinase > protein tyrosine kinase |
| | | protein tyrosine kinase > transmembrane |
| | | receptor protein tyrosine kinase |
| | | transmembrane receptor > transmembrane |
| | | receptor protein tyrosine kinase |
| | | nucleotide binding > ATP binding |
| | | CELL COMPONENT |
| | | cell > membrane fraction |
| | | HUMAN PROTEIN DOMAINS (INTERPRO |
| | | SIGNATURES) |
| | | IPR000719 (sp P09619 PGDR HUMAN) |
| hP20-0018.3 | SEQ ID NO: 76 | HUMAN PANTHER CLASSIFICATIONS |
| | | FAMILY (SUBFAMILY) |
| | | PROTEIN TYROSINE |
| | | KINASE(PLATELET-DERIVED GROWTH FACTOR |
| | | RECEPTOR (PTK GROUP XIV)) |
| | | BIOLOGICAL PROCESS |
| | | Protein metabolism and |
| | | modification(2.05.00.00.00) > Protein |
| | | modification(2.05.03.00.00) > Protein |
| | | phosphorylation(2.05.03.01.00) |
| | | Signal transduction(2.11.00.00.00) > Cell |
| | | surface receptor mediated signal |
| | | transduction(2.11.01.00.00) > Receptor protein tyrosine |
| | | kinase signaling pathway(2.11.01.03.00) |
| | | MOLECULAR FUNCTIONS |
| | | Receptor(1.01.00.00.00) > Protein kinase |
| | | receptor(1.01.06.00.00) |
| | | Kinase(1.15.00.00.00) > Protein |
| | | kinase(1.15.01.00.00) > Tyrosine protein kinase |
| | | receptor(1.15.01.01.00) |
| | | HUMAN GENE ONTOLOGY |
| | | MOLECULAR FUNCTION |
| | | transmembrane receptor protein tyrosine |
| | | kinase > platelet-derived growth factor receptor |
| | | transmembrane receptor protein tyrosine |
| | | kinase > fibroblast growth factor receptor |
| | | transmembrane receptor protein tyrosine |
| | | kinase > hepatocyte growth factor receptor |
| | | CELL COMPONENT |
| | | cell > membrane fraction |
| | | plasma membrane > integral plasma |
| | | membrane protein |
| | | Golgi apparatus > Golgi membrane |
| | | plasma membrane > peripheral plasma |
| | | membrane protein |
| | | intercellular junction > adherens junction |
| | | HUMAN PROTEIN DOMAINS (INTERPRO |
| | | SIGNATURES) |
| | | IPR001245 (TyrKc) |
| | | IPR002290 (S TKc) |
| | | IPR003598 (IGc2) |
| | | IPR003599 (IG) |
| | | IPR000719 (pkinase) |
| | | IPR003006 (ig) |
| | | IPR000719 (PROTEIN KINASE DOM) |
| | | IPR000719 (sp P09619 PGDR HUMAN) |
| hP20-0021.1 | SEQ ID NO: 82 | HUMAN PANTHER CLASSIFICATIONS |
| | | FAMILY (SUBFAMILY) |
| | | Unclassified |
| | | HUMAN GENE ONTOLOGY |
| | | No Gene Ontology |
| | | HUMAN PROTEIN DOMAINS (INTERPRO |
| | | SIGNATURES) |
| | | No Domain Hit |
| hP20-0021.2 | SEQ ID NO: 84 | HUMAN PANTHER CLASSIFICATIONS |
| | | FAMILY (SUBFAMILY) |
| | | CELL ADHESION MOLECULE- |
| | | RELATED(TUMOR SUPPRESSOR PROTEIN DCC) |
| | | BIOLOGICAL PROCESS |
| | | Oncogenesis(2.17.00.00.00) > Tumor |
| | | suppressor(2.17.01.00.00) |
| | | Developmental processes(2.23.00.00.00) > Ectoderm |
| | | development(2.23.08.00.00) > Neurogenesis |
| | | (2.23.08.01.00) |
| | | MOLECULAR FUNCTIONS |
| | | Receptor(1.01.00.00.00) > Other |
| | | receptor(1.01.99.00.00) |
| | | HUMAN GENE ONTOLOGY |
| | | BIOLOGICAL PROCESS |
| | | apoptosis > induction of apoptosis |
| | | neurogenesis > axonogenesis |
| | | cell growth and maintenance > cell |
| | | motility |
| | | cell communication > cell-cell signaling |
| | | GO biological process > developmental |
| | | processes |
| | | MOLECULAR FUNCTION |
| | | defense/immunity protein > immunoglobulin |
| | | B cell receptor > immunoglobulin |
| | | GO molecular function > cell adhesion |
| | | CELL COMPONENT |
| | | plasma membrane > peripheral plasma |
| | | membrane protein |
| | | plasma membrane > integral plasma |
| | | membrane protein |
| | | cell > membrane fraction |
| | | cell > plasma membrane |
| | | HUMAN PROTEIN DOMAINS (INTERPRO |
| | | SIGNATURES) |
| | | IPR003598 (IGc2) |
| | | IPR003599 (IG) |
| | | IPR003006 (ig) |
| hP20-0021.3 | SEQ ID NO: 86 | HUMAN PANTHER CLASSIFICATIONS |
| | | FAMILY (SUBFAMILY) |
| | | CELL ADHESION MOLECULE- |
| | | RELATED(TUMOR SUPPRESSOR PROTEIN DCC) |
| | | BIOLOGICAL PROCESS |
| | | Oncogenesis(2.17.00.00.00) > Tumor |
| | | suppressor(2.17.01.00.00) |
| | | Developmental processes(2.23.00.00.00) > Ectoderm |
| | | development(2.23.08.00.00) > Neurogenesis |
| | | (2.23.08.01.00) |
| | | MOLECULAR FUNCTIONS |
| | | Receptor(1.01.00.00.00) > Other |
| | | receptor(1.01.99.00.00) |
| | | HUMAN GENE ONTOLOGY |
| | | BIOLOGICAL PROCESS |
| | | apoptosis > induction of apoptosis |
| | | neurogenesis > axonogenesis |
| | | cell growth and maintenance > cell |
| | | motility |
| | | cell communication > cell-cell signaling |
| | | GO biological process > developmental |
| | | processes |
| | | MOLECULAR FUNCTION |
| | | defense/immunity protein > immunoglobulin |
| | | B cell receptor > immunoglobulin |
| | | GO molecular function > cell adhesion |
| | | CELL COMPONENT |
| | | plasma membrane > peripheral plasma |
| | | membrane protein |
| | | plasma membrane > integral plasma |
| | | membrane protein |
| | | cell > membrane fraction |
| | | cell > plasma membrane |
| | | HUMAN PROTEIN DOMAINS (INTERPRO |
| | | SIGNATURES) |
| | | IPR003962 (FNTYPEIII) |
| | | IPR003961 (FN3) |
| | | IPR003598 (IGc2) |
| | | IPR003599 (IG) |
| | | IPR003961 (fn3) |
| | | IPR003006 (ig) |
| | | IPR000694 (PRO RICH) |
| hP20-0021.4 | SEQ ID NO: 88 | HUMAN PANTHER CLASSIFICATIONS |
| | | FAMILY (SUBFAMILY) |
| | | CELL ADHESION MOLECULE- |
| | | RELATED(TUMOR SUPPRESSOR PROTEIN DCC) |
| | | BIOLOGICAL PROCESS |
| | | Oncogenesis(2.17.00.00.00) > Tumor |
| | | suppressor(2.17.01.00.00) |
| | | Developmental processes(2.23.00.00.00) > Ectoderm |
| | | development(2.23.08.00.00) > Neurogenesis |
| | | (2.23.08.01.00) |
| | | MOLECULAR FUNCTIONS |
| | | Receptor(1.01.00.00.00) > Other |
| | | receptor(1.01.99.00.00) |
| | | HUMAN GENE ONTOLOGY |
| | | BIOLOGICAL PROCESS |
| | | apoptosis > induction of apoptosis |
| | | neurogenesis > axonogenesis |
| | | cell growth and maintenance > cell |
| | | motility |
| | | cell communication > cell-cell signaling |
| | | GO biological process > developmental |
| | | processes |
| | | MOLECULAR FUNCTION |
| | | defense/immunity protein > immunoglobulin |
| | | B cell receptor > immunoglobulin |
| | | GO molecular function > cell adhesion |
| | | CELL COMPONENT |
| | | plasma membrane > peripheral plasma |
| | | membrane protein |
| | | plasma membrane > integral plasma |
| | | membrane protein |
| | | cell > membrane fraction |
| | | cell > plasma membrane |
| | | HUMAN PROTEIN DOMAINS (INTERPRO |
| | | SIGNATURES) |
| | | IPR003962 (FNTYPEIII) |
| | | IPR003961 (FN3) |
| | | IPR003598 (IGc2) |
| | | IPR003599 (IG) |
| | | IPR003961 (fn3) |
| | | IPR003006 (ig) |
| | | IPR000694 (PRO RICH) |
| hP20-0027.1 | SEQ ID NO: 94 | HUMAN PANTHER CLASSIFICATIONS |
| | | FAMILY (SUBFAMILY) |
| | | MHC CLASS II(MHC CLASS II BETA |
| | | CHAIN) |
| | | BIOLOGICAL PROCESS |
| | | Immunity and defense(2.16.00.00.00) > T- |
| | | cell mediated immunity(2.16.01.00.00) > MHCII-mediated |
| | | immunity(2.16.01.02.00) |
| | | MOLECULAR FUNCTIONS |
| | | Defense/immunity protein(1.25.00.00.00) > Major |
| | | histocompatibility complex antigen(1.25.02.00.00) |
| | | HUMAN GENE ONTOLOGY |
| | | BIOLOGICAL PROCESS |
| | | defence response > immune response |
| | | cell communication > signal transduction |
| | | stress response > defence response |
| | | defence response > cellular defense |
| | | response |
| | | MOLECULAR FUNCTION |
| | | major histocompatibility complex antigen > class |
| | | II major histocompatibility complex antigen |
| | | defense/immunity protein > immunoglobulin |
| | | B cell receptor > immunoglobulin |
| | | defense/immunity protein > major |
| | | histocompatibility complex antigen |
| | | CELL COMPONENT |
| | | cell > membrane fraction |
| | | plasma membrane > integral plasma |
| | | membrane protein |
| | | HUMAN PROTEIN DOMAINS (INTERPRO |
| | | SIGNATURES) |
| | | IPR003597 (IGc1) |
| | | IPR000353 (MHC II beta) |
| | | IPR003006 (ig) |
| | | IPR000353 (sp P13758 HB2F HUMAN) |
| hP20-0030.1 | SEQ ID NO: 110 | HUMAN PANTHER CLASSIFICATIONS |
| | | FAMILY (SUBFAMILY) |
| | | EQUILIBRATIVE NUCLEOSIDE |
| | | TRANSPORTER-RELATED(EQUILIBRATIVE |
| | | NUCLEOSIDE TRANSPORTER 1) |
| | | BIOLOGICAL PROCESS |
| | | Nucleoside, nucleotide and nucleic acid |
| | | metabolism(2.04.00.00.00) |
| | | Transport(2.15.00.00.00) > Nucleoside, |
| | | nucleotide and nucleic acid transport(2.15.07.00.00) |
| | | MOLECULAR FUNCTIONS |
| | | Transporter(1.10.00.00.00) > Other |
| | | transporter(1.10.99.00.00) |
| | | HUMAN GENE ONTOLOGY |
| | | BIOLOGICAL PROCESS |
| | | metabolism > nucleobase, nucleoside, |
| | | nucleotide and nucleic acid metabolism |
| | | nucleobase, nucleoside, nucleotide and |
| | | nucleic acid transport > nucleoside transport |
| | | cell growth and maintenance > transport |
| | | cell growth and maintenance > cell |
| | | proliferation |
| | | MOLECULAR FUNCTION |
| | | glucosidase > mannosyl-oligosaccharide |
| | | glucosidase (processing A-glucosidase I) |
| | | CELL COMPONENT |
| | | cell > membrane fraction |
| | | plasma membrane > integral plasma |
| | | membrane protein |
| | | nucleus > nucleolus |
| | | cell > nucleus |
| | | HUMAN PROTEIN DOMAINS (INTERPRO |
| | | SIGNATURES) |
| | | IPR002259 (DERENTRNSPRT) |
| | | IPR002259 (Nucleoside tran) |
| | | IPR002259 (sp Q9UJY2 Q9UJY2 |
| | | HUMAN) |
| | | IPR002259 (2a57) |
| hP21-012.1 | SEQ ID NO: 116 | HUMAN PANTHER CLASSIFICATIONS |
| | | FAMILY (SUBFAMILY) |
| | | LEUKEMIA INHIBITORY FACTOR |
| | | RECEPTOR FAMILY MEMBER(LEUKEMIA |
| | | INHIBITORY FACTOR RECEPTOR) |
| | | BIOLOGICAL PROCESS |
| | | Immunity and defense(2.16.00.00.00) > Cytokine/ |
| | | chemokine mediated immunity(2.16.10.00.00) |
| | | MOLECULAR FUNCTIONS |
| | | Receptor(1.01.00.00.00) > Cytokine |
| | | receptor(1.01.04.00.00) > Interleukin |
| | | receptor(1.01.04.01.00) |
| | | HUMAN GENE ONTOLOGY |
| | | BIOLOGICAL PROCESS |
| | | signal transduction > cell surface receptor |
| | | linked signal transduction |
| | | MOLECULAR FUNCTION |
| | | enzyme > lactose synthase |
| | | CELL COMPONENT |
| | | plasma membrane > integral plasma |
| | | membrane protein |
| | | cell > membrane fraction |
| | | HUMAN PROTEIN DOMAINS (INTERPRO |
| | | SIGNATURES) |
| | | IPR003961 (FN3) |
| | | IPR003961 (fn3) |
| | | IPR002996 (CR1A 2) |
| hP21-017.1 | SEQ ID NO: 122 | HUMAN PANTHER CLASSIFICATIONS |
| | | FAMILY (SUBFAMILY) |
| | | ZINC (M12A) OR TRYPSIN (S1) |
| | | PEPTIDASE(METALLOPROTEINASE) |
| | | BIOLOGICAL PROCESS |
| | | Biological process |
| | | unclassified(2.99.00.00.00) |
| | | MOLECULAR FUNCTIONS |
| | | Protease(1.17.00.00.00) > Metalloprotease |
| | | (1.17.01.00.00) |
| | | HUMAN GENE ONTOLOGY |
| | | BIOLOGICAL PROCESS |
| | | endocytosis > receptor mediated |
| | | endocytosis |
| | | intracellular protein traffic > endocytosis |
| | | MOLECULAR FUNCTION |
| | | protein binding > lipoprotein binding |
| | | receptor > LDL receptor |
| | | ligand binding or carrier > calcium binding |
| | | CELL COMPONENT |
| | | plasma membrane > coated pit |
| | | HUMAN PROTEIN DOMAINS (INTERPRO |
| | | SIGNATURES) |
| | | IPR000859 (CUB) |
| | | IPR002172 (LDLa) |
| | | IPR002172 (ldl recept a) |
| | | IPR000859 (CUB) |
| | | IPR002172 (LDLRA 2 4) |
| | | IPR000859 (CUB) |
| hP21-017.2 | SEQ ID NO: 124 | HUMAN PANTHER CLASSIFICATIONS |
| | | FAMILY (SUBFAMILY) |
| | | ZINC (M12A) OR TRYPSIN (S1) |
| | | PEPTIDASE(METALLOPROTEINASE) |
| | | BIOLOGICAL PROCESS |
| | | Biological process |
| | | unclassified(2.99.00.00.00) |
| | | MOLECULAR FUNCTIONS |
| | | Protease(1.17.00.00.00) > Metalloprotease |
| | | (1.17.01.00.00) |
| | | HUMAN GENE ONTOLOGY |
| | | BIOLOGICAL PROCESS |
| | | endocytosis > receptor mediated |
| | | endocytosis |
| | | intracellular protein traffic > endocytosis |
| | | MOLECULAR FUNCTION |
| | | protein binding > lipoprotein binding |
| | | receptor > LDL receptor |
| | | ligand binding or carrier > calcium binding |
| | | CELL COMPONENT |
| | | plasma membrane > coated pit |
| | | HUMAN PROTEIN DOMAINS (INTERPRO |
| | | SIGNATURES) |
| | | IPR002172 (LDLRECEPTOR) |
| | | IPR000859 (CUB) |
| | | IPR002172 (LDLa) |
| | | IPR002172 (ldl recept a) |
| | | IPR000859 (CUB) |
| | | IPR002172 (LDLRA 2 5) |
| | | IPR000859 (CUB 2) |
| hP21-017.3 | SEQ ID NO: 126 | HUMAN PANTHER CLASSIFICATIONS |
| | | FAMILY (SUBFAMILY) |
| | | Unclassified |
| | | HUMAN GENE ONTOLOGY |
| | | No Gene Ontology |
| | | HUMAN PROTEIN DOMAINS (INTERPRO |
| | | SIGNATURES) |
| | | No Domain Hit |
| hP21-021.1 | SEQ ID NO: 132 | HUMAN PANTHER CLASSIFICATIONS |
| | | FAMILY (SUBFAMILY) |
| | | SIALYLTRANSFERASE- |
| | | RELATED(SIALYLTRANSFERASE 4A) |
| | | BIOLOGICAL PROCESS |
| | | Lipid, fatty acid and steroid |
| | | metabolism(2.03.00.00.00) |
| | | Protein metabolism and |
| | | modification(2.05.00.00.00) > Protein |
| | | modification(2.05.03.00.00) > Protein |
| | | glycosylation(2.05.03.04.00) |
| | | MOLECULAR FUNCTIONS |
| | | Transferase(1.20.00.00.00) > Glycosyltransferase |
| | | (1.20.09.00.00) |
| | | HUMAN GENE ONTOLOGY |
| | | BIOLOGICAL PROCESS |
| | | protein metabolism and modification > protein |
| | | modification |
| | | protein modification > protein |
| | | glycosylation |
| | | carbohydrate metabolism > aminosugar |
| | | metabolism |
| | | neurogenesis > central nervous system |
| | | development |
| | | DNA dependent DNA replication > DNA |
| | | topological change |
| | | MOLECULAR FUNCTION |
| | | sialyltransferase > beta-galactosamide |
| | | alpha-2,6-sialyltransferase |
| | | sialyltransferase > beta-galactoside alpha- |
| | | 2,3-sialyltransferase |
| | | enzyme > sialyltransferase |
| | | enzyme > nitric oxide synthase |
| | | enzyme > protein-arginine deiminase |
| | | CELL COMPONENT |
| | | cell > membrane fraction |
| | | cytoplasm > Golgi apparatus |
| | | GO cellular component > extracellular |
| | | Golgi apparatus > Golgi lumen |
| | | mitochondrial membrane > mitochondrial |
| | | inner membrane |
| | | HUMAN PROTEIN DOMAINS (INTERPRO |
| | | SIGNATURES) |
| | | IPR001675 (Glyco transf 29) |
| hP21-021.2 | SEQ ID NO: 134 | HUMAN PANTHER CLASSIFICATIONS |
| | | FAMILY (SUBFAMILY) |
| | | SIALYLTRANSFERASE- |
| | | RELATED(SIALYLTRANSFERASE 4A) |
| | | BIOLOGICAL PROCESS |
| | | Lipid, fatty acid and steroid |
| | | metabolism(2.03.00.00.00) |
| | | Protein metabolism and |
| | | modification(2.05.00.00.00) > Protein |
| | | modification(2.05.03.00.00) > Protein |
| | | glycosylation(2.05.03.04.00) |
| | | MOLECULAR FUNCTIONS |
| | | Transferase(1.20.00.00.00) > Glycosyltransferase |
| | | (1.20.09.00.00) |
| | | HUMAN GENE ONTOLOGY |
| | | BIOLOGICAL PROCESS |
| | | protein metabolism and modification > protein |
| | | modification |
| | | protein modification > protein |
| | | glycosylation |
| | | carbohydrate metabolism > aminosugar |
| | | metabolism |
| | | neurogenesis > central nervous system |
| | | development |
| | | DNA dependent DNA replication > DNA |
| | | topological change |
| | | MOLECULAR FUNCTION |
| | | sialyltransferase > beta-galactosamide |
| | | alpha-2,6-sialyltransferase |
| | | sialyltransferase > beta-galactoside alpha- |
| | | 2,3-sialyltransferase |
| | | enzyme > sialyltransferase |
| | | enzyme > nitric oxide synthase |
| | | enzyme > protein-arginine deiminase |
| | | CELL COMPONENT |
| | | cell > membrane fraction |
| | | cytoplasm > Golgi apparatus |
| | | GO cellular component > extracellular |
| | | Golgi apparatus > Golgi lumen |
| | | mitochondrial membrane > mitochondrial |
| | | inner membrane |
| | | HUMAN PROTEIN DOMAINS (INTERPRO |
| | | SIGNATURES) |
| | | IPR001675 (Glyco transf 29) |
| hP21-021.3 | SEQ ID NO: 136 | HUMAN PANTHER CLASSIFICATIONS |
| | | FAMILY (SUBFAMILY) |
| | | SIALYLTRANSFERASE- |
| | | RELATED(SIALYLTRANSFERASE 4A) |
| | | BIOLOGICAL PROCESS |
| | | Lipid, fatty acid and steroid |
| | | metabolism(2.03.00.00.00) |
| | | Protein metabolism and |
| | | modification(2.05.00.00.00) > Protein |
| | | modification(2.05.03.00.00) > Protein |
| | | glycosylation(2.05.03.04.00) |
| | | MOLECULAR FUNCTIONS |
| | | Transferase(1.20.00.00.00) > Glycosyltransferase |
| | | (1.20.09.00.00) |
| | | HUMAN GENE ONTOLOGY |
| | | BIOLOGICAL PROCESS |
| | | protein metabolism and modification > protein |
| | | modification |
| | | protein modification > protein |
| | | glycosylation |
| | | carbohydrate metabolism > aminosugar |
| | | metabolism |
| | | neurogenesis > central nervous system |
| | | development |
| | | DNA dependent DNA replication > DNA |
| | | topological change |
| | | MOLECULAR FUNCTION |
| | | sialyltransferase > beta-galactosamide |
| | | alpha-2,6-sialyltransferase |
| | | sialyltransferase > beta-galactoside alpha- |
| | | 2,3-sialyltransferase |
| | | enzyme > sialyltransferase |
| | | enzyme > nitric oxide synthase |
| | | enzyme > protein-arginine deiminase |
| | | CELL COMPONENT |
| | | cell > membrane fraction |
| | | cytoplasm > Golgi apparatus |
| | | GO cellular component > extracellular |
| | | Golgi apparatus > Golgi lumen |
| | | mitochondrial membrane > mitochondrial |
| | | inner membrane |
| | | HUMAN PROTEIN DOMAINS (INTERPRO |
| | | SIGNATURES) |
| | | IPR001675 (Glyco transf 29) |
| hP21-021.4 | SEQ ID NO: 138 | HUMAN PANTHER CLASSIFICATIONS |
| | | FAMILY (SUBFAMILY) |
| | | SIALYLTRANSFERASE- |
| | | RELATED(SIALYLTRANSFERASE 4A) |
| | | BIOLOGICAL PROCESS |
| | | Lipid, fatty acid and steroid |
| | | metabolism(2.03.00.00.00) |
| | | Protein metabolism and |
| | | modification(2.05.00.00.00) > Protein |
| | | modification(2.05.03.00.00) > Protein |
| | | glycosylation(2.05.03.04.00) |
| | | MOLECULAR FUNCTIONS |
| | | Transferase(1.20.00.00.00) > Glycosyltransferase |
| | | (1.20.09.00.00) |
| | | HUMAN GENE ONTOLOGY |
| | | BIOLOGICAL PROCESS |
| | | protein metabolism and modification > protein |
| | | modification |
| | | protein modification > protein |
| | | glycosylation |
| | | carbohydrate metabolism > aminosugar |
| | | metabolism |
| | | neurogenesis > central nervous system |
| | | development |
| | | DNA dependent DNA replication > DNA |
| | | topological change |
| | | MOLECULAR FUNCTION |
| | | sialyltransferase > beta-galactosamide |
| | | alpha-2,6-sialyltransferase |
| | | sialyltransferase > beta-galactoside alpha- |
| | | 2,3-sialyltransferase |
| | | enzyme > sialyltransferase |
| | | enzyme > nitric oxide synthase |
| | | enzyme > protein-arginine deiminase |
| | | CELL COMPONENT |
| | | cell > membrane fraction |
| | | cytoplasm > Golgi apparatus |
| | | GO cellular component > extracellular |
| | | Golgi apparatus > Golgi lumen |
| | | mitochondrial membrane > mitochondrial |
| | | inner membrane |
| | | HUMAN PROTEIN DOMAINS (INTERPRO |
| | | SIGNATURES) |
| | | IPR001675 (Glyco transf 29) |
| hP21-026.1 | SEQ ID NO: 144 | HUMAN PANTHER CLASSIFICATIONS |
| | | FAMILY (SUBFAMILY) |
| | | EPSIN(EPSIN 2) |
| | | BIOLOGICAL PROCESS |
| | | Signal transduction(2.11.00.00.00) > Intracellular |
| | | signaling cascade(2.11.02.00.00) > Other |
| | | intracellular signaling cascade(2.11.02.99.00) |
| | | Intracellular protein traffic(2.13.00.00.00) > Endocytosis |
| | | (2.13.03.00.00) > Receptor mediated |
| | | endocytosis(2.13.03.03.00) |
| | | MOLECULAR FUNCTIONS |
| | | Membrane traffic protein(1.26.00.00.00) > Other |
| | | membrane traffic protein(1.26.99.00.00) |
| | | HUMAN GENE ONTOLOGY |
| | | BIOLOGICAL PROCESS |
| | | intracellular protein traffic > endocytosis |
| | | peptidoglycan catabolism > synaptic |
| | | vesicle endocytosis |
| | | endocytosis > synaptic vesicle endocytosis |
| | | peptidoglycan catabolism > actin filament |
| | | organization |
| | | actin modification > actin filament |
| | | organization |
| | | MOLECULAR FUNCTION |
| | | glucosidase > mannosyl-oligosaccharide |
| | | glucosidase (processing A-glucosidase I) |
| | | cytoskeletal protein binding protein > cytoskeletal |
| | | adaptor |
| | | CELL COMPONENT |
| | | plasma membrane > coated vesicle |
| | | nuclear membrane > nuclear membrane |
| | | lumen |
| | | cortex > actin cortical patch (sensu |
| | | Saccharomyces) |
| | | HUMAN PROTEIN DOMAINS (INTERPRO |
| | | SIGNATURES) |
| | | IPR001026 (ENTH) |
| | | IPR001026 (ENTH) |
| hP21-032.1 | SEQ ID NO: 150 | HUMAN PANTHER CLASSIFICATIONS |
| | | FAMILY (SUBFAMILY) |
| | | NOTCH/FIBULIN-RELATED(FIBULIN- |
| | | 1) |
| | | BIOLOGICAL PROCESS |
| | | Biological process |
| | | unclassified(2.99.00.00.00) |
| | | MOLECULAR FUNCTIONS |
| | | Extracellular matrix(1.27.00.00.00) > Extracellular |
| | | matrix structural protein(1.27.01.00.00) |
| | | HUMAN GENE ONTOLOGY |
| | | BIOLOGICAL PROCESS |
| | | cell adhesion > cell-cell matrix adhesion |
| | | transport > extracellular transport |
| | | protein-membrane targeting > post- |
| | | translational membrane targeting |
| | | defence response > cellular defense |
| | | response |
| | | immune response > complement activation |
| | | MOLECULAR FUNCTION |
| | | ligand binding or carrier > calcium binding |
| | | ligand binding or carrier > protein binding |
| | | molecular_function unknown > lymphocyte |
| | | antigen |
| | | CELL COMPONENT |
| | | extracellular > extracellular matrix |
| | | extracellular > extracellular space |
| | | cell > plasma membrane |
| | | plasma membrane > peripheral plasma |
| | | membrane protein |
| | | HUMAN PROTEIN DOMAINS (INTERPRO |
| | | SIGNATURES) |
| | | IPR001881 (EGF CA) |
| | | IPR000561 (EGF) |
| | | IPR000020 (ANATO) |
| | | IPR000561 (EGF) |
| | | IPR000020 (ANATO) |
| | | IPR001881 (EGF CA 2 8) |
| | | NULL (CYS RICH) |
| | | IPR000020 (ANAPHYLATOXIN 2 2) |
| hP21-032.2 | SEQ ID NO: 152 | HUMAN PANTHER CLASSIFICATIONS |
| | | FAMILY (SUBFAMILY) |
| | | NOTCH/FIBULIN-RELATED(FIBULIN- |
| | | 1) |
| | | BIOLOGICAL PROCESS |
| | | Biological process |
| | | unclassified(2.99.00.00.00) |
| | | MOLECULAR FUNCTIONS |
| | | Extracellular matrix(1.27.00.00.00) > Extracellular |
| | | matrix structural protein(1.27.01.00.00) |
| | | HUMAN GENE ONTOLOGY |
| | | BIOLOGICAL PROCESS |
| | | cell adhesion > cell-cell matrix adhesion |
| | | transport > extracellular transport |
| | | protein-membrane targeting > post- |
| | | translational membrane targeting |
| | | defence response > cellular defense |
| | | response |
| | | immune response > complement activation |
| | | MOLECULAR FUNCTION |
| | | ligand binding or carrier > calcium binding |
| | | ligand binding or carrier > protein binding |
| | | molecular_function unknown > lymphocyte |
| | | antigen |
| | | CELL COMPONENT |
| | | extracellular > extracellular matrix |
| | | extracellular > extracellular space |
| | | extracellular matrix > basement membrane |
| | | cell > plasma membrane |
| | | plasma membrane > peripheral plasma |
| | | membrane protein |
| | | HUMAN PROTEIN DOMAINS (INTERPRO |
| | | SIGNATURES) |
| | | IPR001881 (EGF CA) |
| | | IPR000561 (EGF) |
| | | IPR000020 (ANATO) |
| | | IPR000561 (EGF) |
| | | IPR000020 (ANATO) |
| | | IPR001881 (EGF CA 2 8) |
| | | NULL (CYS RICH) |
| | | IPR000020 (ANAPHYLATOXIN 2 2) |
| hP21-032.3 | SEQ ID NO: 154 | HUMAN PANTHER CLASSIFICATIONS |
| | | FAMILY (SUBFAMILY) |
| | | NOTCH/FIBULIN-RELATED(FIBULIN- |
| | | 1) |
| | | BIOLOGICAL PROCESS |
| | | Biological process |
| | | unclassified(2.99.00.00.00) |
| | | MOLECULAR FUNCTIONS |
| | | Extracellular matrix(1.27.00.00.00) > Extracellular |
| | | matrix structural protein(1.27.01.00.00) |
| | | HUMAN GENE ONTOLOGY |
| | | BIOLOGICAL PROCESS |
| | | cell adhesion > cell-cell matrix adhesion |
| | | transport > extracellular transport |
| | | stress response > defence response |
| | | immune response > complement activation |
| | | protein-membrane targeting > post- |
| | | translational membrane targeting |
| | | MOLECULAR FUNCTION |
| | | ligand binding or carrier > calcium binding |
| | | ligand binding or carrier > protein binding |
| | | molecular_function unknown > lymphocyte |
| | | antigen |
| | | CELL COMPONENT |
| | | extracellular > extracellular matrix |
| | | extracellular > extracellular space |
| | | extracellular matrix > basement membrane |
| | | cell > plasma membrane |
| | | plasma membrane > peripheral plasma |
| | | membrane protein |
| | | HUMAN PROTEIN DOMAINS (INTERPRO |
| | | SIGNATURES) |
| | | IPR001881 (EGF CA) |
| | | IPR000561 (EGF) |
| | | IPR000020 (ANATO) |
| | | IPR000561 (EGF) |
| | | IPR000020 (ANATO) |
| | | IPR001881 (EGF CA 2 8) |
| | | NULL (CYS RICH) |
| | | IPR000020 (ANAPHYLATOXIN 2 3) |
| hP21-032.4 | SEQ ID NO: 156 | HUMAN PANTHER CLASSIFICATIONS |
| | | FAMILY (SUBFAMILY) |
| | | NOTCH/FIBULIN-RELATED(FIBULIN- |
| | | 1) |
| | | BIOLOGICAL PROCESS |
| | | Biological process |
| | | unclassified(2.99.00.00.00) |
| | | MOLECULAR FUNCTIONS |
| | | Extracellular matrix(1.27.00.00.00) > Extracellular |
| | | matrix structural protein(1.27.01.00.00) |
| | | HUMAN GENE ONTOLOGY |
| | | BIOLOGICAL PROCESS |
| | | cell adhesion > cell-cell matrix adhesion |
| | | transport > extracellular transport |
| | | stress response > defence response |
| | | immune response > complement activation |
| | | MOLECULAR FUNCTION |
| | | ligand binding or carrier > calcium binding |
| | | ligand binding or carrier > protein binding |
| | | molecular_function unknown > lymphocyte |
| | | antigen |
| | | CELL COMPONENT |
| | | extracellular > extracellular matrix |
| | | extracellular > extracellular space |
| | | cell > plasma membrane |
| | | HUMAN PROTEIN DOMAINS (INTERPRO |
| | | SIGNATURES) |
| | | IPR001881 (EGF CA) |
| | | IPR000561 (EGF) |
| | | IPR000020 (ANATO) |
| | | IPR000561 (EGF) |
| | | IPR000020 (ANATO) |
| | | IPR001881 (EGF CA 2 8) |
| | | NULL (CYS RICH) |
| | | IPR000020 (ANAPHYLATOXIN 2 3) |
| hP21-032.5 | SEQ ID NO: 158 | HUMAN PANTHER CLASSIFICATIONS |
| | | FAMILY (SUBFAMILY) |
| | | NOTCH/FIBULIN-RELATED(FIBULIN- |
| | | 1) |
| | | BIOLOGICAL PROCESS |
| | | Biological process |
| | | unclassified(2.99.00.00.00) |
| | | MOLECULAR FUNCTIONS |
| | | Extracellular matrix(1.27.00.00.00) > Extracellular |
| | | matrix structural protein(1.27.01.00.00) |
| | | HUMAN GENE ONTOLOGY |
| | | BIOLOGICAL PROCESS |
| | | cell adhesion > cell-cell matrix adhesion |
| | | transport > extracellular transport |
| | | stress response > defence response |
| | | immune response > complement activation |
| | | MOLECULAR FUNCTION |
| | | ligand binding or carrier > calcium binding |
| | | ligand binding or carrier > protein binding |
| | | molecular_function unknown > lymphocyte |
| | | antigen |
| | | CELL COMPONENT |
| | | extracellular > extracellular matrix |
| | | extracellular > extracellular space |
| | | cell > plasma membrane |
| | | HUMAN PROTEIN DOMAINS (INTERPRO |
| | | SIGNATURES) |
| | | IPR001881 (EGF CA) |
| | | IPR000561 (EGF) |
| | | IPR000020 (ANATO) |
| | | IPR000561 (EGF) |
| | | IPR000020 (ANATO) |
| | | IPR001881 (EGF CA 2 8) |
| | | NULL (CYS RICH) |
| | | IPR000020 (ANAPHYLATOXIN 2 2) |
| hP21-032.6 | SEQ ID NO: 160 | HUMAN PANTHER CLASSIFICATIONS |
| | | FAMILY (SUBFAMILY) |
| | | NOTCH/FIBULIN-RELATED(FIBULIN- |
| | | 1) |
| | | BIOLOGICAL PROCESS |
| | | Biological process |
| | | unclassified(2.99.00.00.00) |
| | | MOLECULAR FUNCTIONS |
| | | Extracellular matrix(1.27.00.00.00) > Extracellular |
| | | matrix structural protein(1.27.01.00.00) |
| | | HUMAN GENE ONTOLOGY |
| | | BIOLOGICAL PROCESS |
| | | cell adhesion > cell-cell matrix adhesion |
| | | transport > extracellular transport |
| | | protein-membrane targeting > post- |
| | | translational membrane targeting |
| | | defence response > cellular defense |
| | | response |
| | | immune response > complement activation |
| | | MOLECULAR FUNCTION |
| | | ligand binding or carrier > calcium binding |
| | | ligand binding or carrier > protein binding |
| | | molecular_function unknown > lymphocyte |
| | | antigen |
| | | CELL COMPONENT |
| | | extracellular > extracellular matrix |
| | | extracellular > extracellular space |
| | | extracellular matrix > basement membrane |
| | | cell > plasma membrane |
| | | plasma membrane > peripheral plasma |
| | | membrane protein |
| | | HUMAN PROTEIN DOMAINS (INTERPRO |
| | | SIGNATURES) |
| | | IPR001881 (EGF CA) |
| | | IPR000561 (EGF) |
| | | IPR000020 (ANATO) |
| | | IPR000561 (EGF) |
| | | IPR000020 (ANATO) |
| | | IPR001881 (EGF CA 2 8) |
| | | NULL (CYS RICH) |
| | | IPR000020 (ANAPHYLATOXIN 2 2) |
| hP21-032.7 | SEQ ID NO: 162 | HUMAN PANTHER CLASSIFICATIONS |
| | | FAMILY (SUBFAMILY) |
| | | NOTCH/FIBULIN-RELATED(FIBULIN- |
| | | 1) |
| | | BIOLOGICAL PROCESS |
| | | Biological process |
| | | unclassified(2.99.00.00.00) |
| | | MOLECULAR FUNCTIONS |
| | | Extracellular matrix(1.27.00.00.00) > Extracellular |
| | | matrix structural protein(1.27.01.00.00) |
| | | HUMAN GENE ONTOLOGY |
| | | BIOLOGICAL PROCESS |
| | | cell adhesion > cell-cell matrix adhesion |
| | | transport > extracellular transport |
| | | protein-membrane targeting > post- |
| | | translational membrane targeting |
| | | defence response > cellular defense |
| | | response |
| | | immune response > complement activation |
| | | MOLECULAR FUNCTION |
| | | ligand binding or carrier > calcium binding |
| | | ligand binding or carrier > protein binding |
| | | molecular_function unknown > lymphocyte |
| | | antigen |
| | | CELL COMPONENT |
| | | extracellular > extracellular matrix |
| | | extracellular > extracellular space |
| | | extracellular matrix > basement membrane |
| | | cell > plasma membrane |
| | | plasma membrane > peripheral plasma |
| | | membrane protein |
| | | HUMAN PROTEIN DOMAINS (INTERPRO |
| | | SIGNATURES) |
| | | IPR001881 (EGF CA) |
| | | IPR000561 (EGF) |
| | | IPR000020 (ANATO) |
| | | IPR000561 (EGF) |
| | | IPR000020 (ANATO) |
| | | IPR001881 (EGF CA 2 8) |
| | | NULL (CYS RICH) |
| | | IPR000020 (ANAPHYLATOXIN 2 3) |
| hP21-032.8 | SEQ ID NO: 164 | HUMAN PANTHER CLASSIFICATIONS |
| | | FAMILY (SUBFAMILY) |
| | | NOTCH/FIBULIN-RELATED(FIBULIN- |
| | | 1) |
| | | BIOLOGICAL PROCESS |
| | | Biological process |
| | | unclassified(2.99.00.00.00) |
| | | MOLECULAR FUNCTIONS |
| | | Extracellular matrix(1.27.00.00.00) > Extracellular |
| | | matrix structural protein(1.27.01.00.00) |
| | | HUMAN GENE ONTOLOGY |
| | | BIOLOGICAL PROCESS |
| | | cell adhesion > cell-cell matrix adhesion |
| | | transport > extracellular transport |
| | | protein-membrane targeting > post- |
| | | translational membrane targeting |
| | | defence response > cellular defense |
| | | response |
| | | immune response > complement activation |
| | | MOLECULAR FUNCTION |
| | | ligand binding or carrier > calcium binding |
| | | ligand binding or carrier > protein binding |
| | | molecular_function unknown > lymphocyte |
| | | antigen |
| | | CELL COMPONENT |
| | | extracellular > extracellular matrix |
| | | extracellular > extracellular space |
| | | cell > plasma membrane |
| | | plasma membrane > peripheral plasma |
| | | membrane protein |
| | | HUMAN PROTEIN DOMAINS (INTERPRO |
| | | SIGNATURES) |
| | | IPR001881 (EGF CA) |
| | | IPR000561 (EGF) |
| | | IPR000020 (ANATO) |
| | | IPR000561 (EGF) |
| | | IPR000020 (ANATO) |
| | | IPR001881 (EGF CA 2 8) |
| | | NULL (CYS RICH) |
| | | IPR000020 (ANAPHYLATOXIN 2 3) |
| hP21-032.9 | SEQ ID NO: 166 | HUMAN PANTHER CLASSIFICATIONS |
| | | FAMILY (SUBFAMILY) |
| | | NOTCH/FIBULIN-RELATED(FIBULIN- |
| | | 1) |
| | | BIOLOGICAL PROCESS |
| | | Biological process |
| | | unclassified(2.99.00.00.00) |
| | | MOLECULAR FUNCTIONS |
| | | Extracellular matrix(1.27.00.00.00) > Extracellular |
| | | matrix structural protein(1.27.01.00.00) |
| | | HUMAN GENE ONTOLOGY |
| | | BIOLOGICAL PROCESS |
| | | cell adhesion > cell-cell matrix adhesion |
| | | transport > extracellular transport |
| | | stress response > defence response |
| | | immune response > complement activation |
| | | MOLECULAR FUNCTION |
| | | ligand binding or carrier > calcium binding |
| | | ligand binding or carrier > protein binding |
| | | molecular_function unknown > lymphocyte |
| | | antigen |
| | | CELL COMPONENT |
| | | extracellular > extracellular matrix |
| | | extracellular > extracellular space |
| | | cell > plasma membrane |
| | | HUMAN PROTEIN DOMAINS (INTERPRO |
| | | SIGNATURES) |
| | | IPR001881 (EGF CA) |
| | | IPR000561 (EGF) |
| | | IPR000020 (ANATO) |
| | | IPR000561 (EGF) |
| | | IPR000020 (ANATO) |
| | | IPR001881 (EGF CA 2 8) |
| | | NULL (CYS RICH) |
| | | IPR000020 (ANAPHYLATOXIN 2 3) |
| hP21-032.10 | SEQ ID NO: 168 | HUMAN PANTHER CLASSIFICATIONS |
| | | FAMILY (SUBFAMILY) |
| | | NOTCH/FIBULIN-RELATED(FIBULIN- |
| | | 1) |
| | | BIOLOGICAL PROCESS |
| | | Biological process |
| | | unclassified(2.99.00.00.00) |
| | | MOLECULAR FUNCTIONS |
| | | Extracellular matrix(1.27.00.00.00) > Extracellular |
| | | matrix structural protein(1.27.01.00.00) |
| | | HUMAN GENE ONTOLOGY |
| | | BIOLOGICAL PROCESS |
| | | cell adhesion > cell-cell matrix adhesion |
| | | transport > extracellular transport |
| | | protein-membrane targeting > post- |
| | | translational membrane targeting |
| | | defence response > cellular defense |
| | | response |
| | | immune response > complement activation |
| | | MOLECULAR FUNCTION |
| | | ligand binding or carrier > calcium binding |
| | | ligand binding or carrier > protein binding |
| | | molecular_function unknown > lymphocyte |
| | | antigen |
| | | CELL COMPONENT |
| | | extracellular > extracellular matrix |
| | | extracellular > extracellular space |
| | | extracellular matrix > basement membrane |
| | | cell > plasma membrane |
| | | plasma membrane > peripheral plasma |
| | | membrane protein |
| | | HUMAN PROTEIN DOMAINS (INTERPRO |
| | | SIGNATURES) |
| | | IPR001881 (EGF CA) |
| | | IPR000561 (EGF) |
| | | IPR000020 (ANATO) |
| | | IPR000561 (EGF) |
| | | IPR000020 (ANATO) |
| | | IPR001881 (EGF CA 2 8) |
| | | NULL (CYS RICH) |
| | | IPR000020 (ANAPHYLATOXIN 2 3) |

[0313] A CA protein (CAP) is a sialyl transferase protein wherein the CAP sequence is selected from the group consisting of SEQ ID NOS: 132, 134, 136, and 138.

[0314] A CA protein (CAP) is a low density lipoprotein receptor wherein the CAP sequence is selected from the group consisting of SEQ ID NOS: 28, 30, 44, 46, 48, 50, 122, 122, and 124 shown in Tables 1-15.

[0315] A CA protein (CAP) is a tumor suppressor protein wherein the CAP sequence is selected from the group consisting of SEQ ID NOS: 84, 86, and 88.

[0316] A CA protein (CAP) is a calcium binding protein wherein the CAP sequence is selected from the group consisting of SEQ ID NOS: 44, 46, 48, 50, 122, 124, 150, 152, 154, 156, 158, 160, 162, 164, 166, and 168.

[0317] A CA protein (CAP) is a protein kinase receptor wherein the CAP sequence is selected from the group consisting of SEQ ID NOS: 72, 74 and 76.

[0318] A CA protein (CAP) is involved in signalling/signal transduction wherein the CAP sequence is selected from the group consisting of SEQ ID NOS: 28, 30, 38, 44, 46, 48, 50, 56, 58, 60, 62, 64, 72, 74, 76, 94, 116, and 144.

[0319] A CA protein (CAP) is a cell adhesion molecule wherein the CAP sequence is selected from the group consisting of SEQ ID NOS: 56, 58, 60, 62, 64, 84, 86, 88, 150, 152, 154, 156, 158, 160, 162, 164, 166, and 168.

[0320] A CA protein (CAP) is expressed on a cell surface, wherein the CA protein is selected from the group consisting of SEQ ID NOS: 6, 8, 10, 18, 20, 28, 30, 36, 38, 44, 46, 48, 50, 56, 58, 60, 62, 64, 72, 74, 76, 82, 84, 86, 88, 94, 110, 116, 122, 124, 126, 132, 134, 136, 138, 144, 150, 152, 154, 156, 158, 160, 162, 164, 166, and 168.

[0321] Certain aspects of the present invention are described in greater detail in the non-limiting examples that follow.

### EXAMPLES

[0322] The following examples are put forth so as to provide those of ordinary skill in the art with a complete disclosure and description of how to make and use the present invention, and are not intended to limit the scope of what the inventors regard as their invention nor are they intended to represent that the experiments below are all and only experiments performed. Efforts have been made to ensure accuracy with respect to numbers used (e.g. amounts, temperature, etc.) but some experimental errors and deviations should be accounted for. Unless indicated otherwise, parts are parts by weight, molecular weight is weight average molecular weight, temperature is in degrees Celsius, and pressure is at or near atmospheric.

### (a) Example 1

### Insertion Site Analysis Following Tumor Induction in Mice

[0323] Tumors are induced in mice using either mouse mammary tumor virus (MMTV) or murine leukemia virus (MLV). MMTV causes mammary adenocarcinomas and MLV causes a variety of different hematopoetic malignancies (primarily T- or B-cell lymphomas). Three routes of infection are used: (1) injection of neonates with purified virus preparations, (2) infection by milk-borne virus during nursing, and (3) genetic transmission of pathogenic proviruses via the germ-line (Akvr1 and/or Mtv2). The type of malignancy present in each affected mouse is determined by histological analysis of H&E-stained thin sections of formalin-fixed, paraffin-embedded biopsy samples. Host DNA sequences flanking all clonally-integrated proviruses in each tumor are recovered by nested anchored-PCR using two virus-specific primers and two primers specific for a 40 bp double stranded DNA anchor ligated to restriction enzyme digested tumor DNA. Amplified bands representing host/virus junction fragments are cloned and sequenced. Then the host sequences (called “tags”) are used to BLAST analyze the Celera mouse genomic sequence. For each individual tag, three parameters are recorded: (1) the mouse chromosome assignment, (2) base pair coordinates at which the integration occurred, and (3) provirus orientation. Using this information, all available tags from all analyzed tumors are mapped to the mouse genome. To identify the protooncogene targets of provirus insertion mutation, the provirus integration pattern at each cluster of integrants is analyzed relative to the locations of all known genes in the transcriptome. The presence of provirus at the same locus in two or more independent tumors is prima facie evidence that a protooncogene is present at or very near the proviral integration sites. This is because the genome is too large for random integrations to result in observable clustering. Any clustering that is detected is unequivocal evidence for biological selection during tumorigenesis. In order to identify the human orthologs of the protooncogene targets of provirus insertion mutation, a comparative analysis of syntenic regions of the mouse and human genomes is performed.

[0324] An example of PCR amplification of host/virus junction fragments is presented in FIG. 1. Lane 1 contains the amplification products from normal control DNA and lane 2 contains the amplification products from tumor DNA. The bands result from 5′ host/virus junction fragments present in the DNA samples. Lane 1 has bands from the env/3′ LTR junctions from all proviruses (upper) and the host/5′ LTR from the pathogenic endogenous Mtv2 provirus present in this particular mouse strain. This endogenous provirus is detected because its sequence is identical to the new clonally integrated proviruses in the tumor. All four new clonally integrated proviruses known to be in this tumor are readily detected.

### Example 2

### Analysis of Quantitative RT-PCR: Comparative C_{T} Method

[0325] The expression level of target genes is quantified using the ABI PRISM 7900HT Sequence Detection System (Applied Biosystems, California). The method is based on the quantitation of the initial copy number of target template in comparison to that of a reference (normalizer) housekeeper gene (Pre-Developed TaqMan® Assay Reagents Gene Expression Quantification Protocol, Applied Biosystems, 2001). Accumulation of DNA product with each PCR cycle is related to amplicon efficiency and the initial template concentration. Therefore the amplification efficiency of both the target and the normalizer must be approximately equal. The threshold cycle (C_{T}), which is dependent on the starting template copy number and the DNA amplification efficiency, is a PCR cycle during which PCR product growth is exponential. With a similar dynamic range for the target and normalizer, the comparative C_{T} method is applicable.

[0326] An example of the comparative C_{T} method of gene expression for quantitative RT-PCR is shown in FIG. 2. In the first step, assays are performed in quadruplicate on a normal tissue and several sample tissues. In these tissues, the means and standard deviations of C_{T} values are determined for housekeeper genes (chosen as controls if shown to be biologically stable among various samples, irrespective of disease state) and for the target gene. FIG. 2 shows an example of average C_{T} values for a housekeeper gene and target gene. These values can fall within a range from upper teens to 40 depending on the intrinsic expression level of the gene in the particular tissue. The coefficient of variance of all replicate sets cannot exceed 1.5%.

[0327] An assessment of how the ΔC_{T} changes with template dilution verifies that the efficiencies of the target and housekeeper amplicons are approximately equal if the log input amount of template RNA versus ΔC_{T} plot has a slope <0.10. With the relative efficiencies verified for target and housekeeper, the ΔΔC_{T} comparative calculation becomes valid, as mentioned above. An example of the calculated difference between the C_{T} values of target and housekeeper genes (ΔC_{T}) for various samples is shown in FIG. 3. The ΔΔC_{T} is calculated for each sample by subtracting its ΔC_{T} value from the ΔC_{T} value of the baseline (calibrator) sample. If the expression is increased in some samples and decreased in others, ΔΔC_{T} will be a mixture of negative and positive values. The final step in the calculation is to transform these values to absolute values. The formula for this is:
Comparative expression level=2^{-ΔΔCT}

[0328] The final value for the calibrator should always be one. FIG. 4 shows the ΔΔC_{T} and comparative expression level for each sample from FIG. 3.

### (b) Example 3

### Detection of Elevated Levels of cDNA Associated with Cancer Using Arrays

[0329] cDNA sequences representing a variety of candidate CA genes to be screened for differential expression in cancer are assayed by hybridization on polynucleotide arrays. The cDNA sequences include cDNA clones isolated from cell lines or tissues of interest. The cDNA sequences analyzed also include polynucleotides comprising sequence overlap with sequences in the Unigene database, and which encode a variety of gene products of various origins, functionality, and levels of characterization. cDNAs are spotted onto reflective slides (Amersham) according to methods well known in the art at a density of 9,216 spots per slide representing 4,068 sequences (including controls) spotted in duplicate, with approximately 0.8 μl of an approximately 200 ng/μl solution of cDNA.

[0330] PCR products of selected cDNA clones corresponding to the gene products of interest are prepared in a 50% DMSO solution. These PCR products are spotted onto Amersham aluminum microarray slides at a density of 9216 clones per array using a Molecular Dynamics Generation III spotting robot. Clones are spotted in duplicate, for a total of 4608 different sequences per chip.

[0331] cDNA probes are prepared from total RNA obtained by laser capture microdissection (LCM, Arcturus Enginering Inc., Mountain View, Calif.) of tumor tissue samples and normal tissue samples isolated from patients.

[0332] Total RNA is first reverse transcribed into cDNA using a primer containing a T7 RNA polymerase promoter, followed by second strand DNA synthesis. cDNA is then transcribed in vitro to produce antisense RNA using the T7 promoter-mediated expression (see, e.g., Luo et al. (1999) Nature Med 5:117-122), and the antisense RNA is then converted into cDNA. The second set of cDNAs are again transcribed in vitro, using the T7 promoter, to provide antisense RNA. This antisense RNA is then fluorescently labeled, or the RNA is again converted into cDNA, allowing for a third round of T7-mediated amplification to produce more antisense RNA. Thus the procedure provides for two or three rounds of in vitro transcription to produce the final RNA used for fluorescent labeling. Probes are labeled by making fluorescently labeled cDNA from the RNA starting material. Fluorescently labeled cDNAs prepared from the tumor RNA sample are compared to fluorescently labeled cDNAs prepared from normal cell RNA sample. For example, the cDNA probes from the normal cells are labeled with Cy3 fluorescent dye (green) and the cDNA probes prepared from suspected cancer cells are labeled with Cy5 fluorescent dye (red).

[0333] The differential expression assay is performed by mixing equal amounts of probes from tumor cells and normal cells of the same patient. The arrays are prehybridized by incubation for about 2 hrs at 60° C. in 5×SSC, 0.2% SDS, 1 mM EDTA, and then washing three times in water and twice in isopropanol. Following prehybridization of the array, the probe mixture is then hybridized to the array under conditions of high stringency (overnight at 42° C. in 50% formamide, 5×SSC, and 0.2% SDS. After hybridization, the array is washed at 55° C. three times as follows: 1) first wash in 1×SSC/0.2% SDS; 2) second wash in 0.1×SSC/0.2% SDS; and 3) third wash in 0.1×SSC.

[0334] The arrays are then scanned for green and red fluorescence using a Molecular Dynamics Generation III dual color laser-scanner/detector. The images are processed using BioDiscovery Autogene software, and the data from each scan set normalized. The experiment is repeated, this time labeling the two probes with the opposite color in order to perform the assay in both “color directions.” Each experiment is sometimes repeated with two more slides (one in each color direction). The data from each scan is normalized, and the level of fluorescence for each sequence on the array expressed as a ratio of the geometric mean of 8 replicate spots/genes from the four arrays or 4 replicate spots/gene from 2 arrays or some other permutation.

[0335] Normalization: The objective of normalization is to generate a cDNA library in which all transcripts expressed in a particular cell type or tissue are equally represented (S. M. Weissman, Mol. Biol. Med. 4(3):133-143 (1987); Patanjali, et al., Proc. Natl. Acad. Sci. USA 88(5):1943-1947 (1991)), and therefore isolation of as few as 30,000 recombinant clones in an optimally normalized library may represent the entire gene expression repertoire of a cell, estimated to number 10,000 per cell.

[0336] Total RNA is extracted from harvested cells using RNeasy™ Protect Kit (Qiagen, Valencia, Calif.), following manufacturer's recommended procedures. RNA is quantified using RiboGreen™ RNA quantification kit (Molecular Probes, Inc. Eugene, Oreg.). One μg of total RNA is reverse transcribed and PCR amplified using SMART™ PCR cDNA synthesis kit (ClonTech, Palo Alto, Calif.). The cDNA products are size-selected by agarose gel electrophoresis using standard procedures (Sambrook, J. T., et al. Molecular Cloning: A Laboratory Manual, 2d ed., Cold Spring Harbor Laboratory Press, NY). The cDNA is extracted using Bio 101 Geneclean® II kit (Qbiogene, Carlsbad, Calif.). Normalization of the cDNA is carried out using kinetics of hybridization principles: 1.0 μg of cDNA is denatured by heat at 100° C. for 10 minutes, then incubated at 42° C. for 42 hours in the presence of 120 mM NaCl, 10 mM Tris.HCl (pH=8.0), 5 mM EDTA.Na+ and 50% formamide. Single-stranded cDNA (“normalized”) is purified by hydroxyapatite chromatography (#130-0520, BioRad, Hercules, Calif.) following the manufacturer's recommended procedures, amplified and converted to double-stranded cDNA by three cycles of PCR amplification, and cloned into plasmid vectors using standard procedures (Sambrook, J. T., et al. Molecular Cloning: A Laboratory Manual, 2d ed., Cold Spring Harbor Laboratory Press, NY). All primers/adaptors used in the normalization and cloning process are provided by the manufacturer in the SMART™ PCR cDNA synthesis kit (ClonTech, Palo Alto, Calif.). Supercompetent cells (XL-2 Blue Ultracompetent Cells, Stratagene, California) are transfected with the normalized cDNA libraries, plated on solid media and grown overnight at 36° C.

[0337] The sequences of 10,000 recombinants per normalized library are analyzed by capillary sequencing using the ABI PRISM 3700 DNA Analyzer (Applied Biosystems, California). To determine the representation of transcripts in a library, BLAST analysis is performed on the clone sequences to assign transcript identity to each isolated clone, i.e., the sequences of the isolated polynucleotides are first masked to eliminate low complexity sequences using the XBLAST masking program (Claverie “Effective Large-Scale Sequence Similarity Searches,” Computer Methods for Macromolecular Sequence Analysis, Doolittle, ed., Meth. Enzymol. 266:212-227 Academic Press, NY, N.Y. (1996); see particularly Claverie, in “Automated DNA Sequencing and Analysis Techniques” Adams et al., eds., Chap. 36, p. 267 Academic Press, San Diego, 1994 and Claverie et al. Comput. Chem. (1993) 17:191). Generally, masking does not influence the final search results, except to eliminate sequences of relative little interest due to their low complexity, and to eliminate multiple “hits” based on similarity to repetitive regions common to multiple sequences, e.g., Alu repeats. The remaining sequences are then used in a BLASTN vs. GenBank search. The sequences are also used as query sequence in a BLASTX vs. NRP (non-redundant proteins) database search.

[0338] Automated sequencing reactions are performed using a Perkin-Elmer PRISM Dye Terminator Cycle Sequencing Ready Reaction Kit containing AmpliTaq DNA Polymerase, FS, according to the manufacturer's directions. The reactions are cycled on a GeneAmp PCR System 9600 as per manufacturer's instructions, except that they are annealed at 20° C. or 30° C. for one minute. Sequencing reactions are ethanol precipitated, pellets are resuspended in 8 microliters of loading buffer, 1.5 microliters is loaded on a sequencing gel, and the data is collected by an ABI PRISM 3700 DNA Sequencer. (Applied Biosystems, Foster City, Calif.).

[0339] The number of times a sequence is represented in a library is determined by performing sequence identity analysis on the cloned cDNA sequences and assigning transcript identity to each isolated clone. First, each sequence is checked to determine if it is a bacterial, ribosomal, or mitochondrial contaminant. Such sequences are excluded from the subsequent analysis. Second, sequence artifacts, such as vector and repetitive elements, are masked and/or removed from each sequence.

[0340] The remaining sequences are compared via BLAST (Altschul et. al, J. Mol. Biol., 215:40, 1990) to GenBank and EST databases for gene identification and are compared with each other via FastA (Pearson & Lipman, PNAS, 85:2444, 1988) to calculate the frequency of cDNA appearance in the normalized cDNA library. The sequences are also searched against the GenBank and GeneSeq nucleotide databases using the BLASTN program (BLASTN 1.3 MP: Altschul et al., J. Mol. Bio. 215:403, 1990). Fourth, the sequences are analyzed against a non-redundant protein (NRP) database with the BLASTX program (BLASTX 1.3 MP: Altschul et al., supra). This protein database is a combination of the Swiss-Prot, PIR, and NCBI GenPept protein databases. The BLASTX program is run using the default BLOSUM-62 substitution matrix with the filter parameter: “xnu+seg”. The score cutoff utilized is 75. Assembly of overlapping clones into contigs is done using the program Sequencher (Gene Codes Corp.; Ann Arbor, Mich.). The assembled contigs are analyzed using the programs in the GCG package (Genetic Computer Group, University Research Park, 575 Science Drive, Madison, Wis. 53711) Suite Version 10.1.

### (c) Example 4

### Detection of CA-Sequences in Human Cancer Cells and Tissues

[0341] DNA from prostate and breast cancer tissues and other human cancer tissues, human colon, normal human tissues including non-cancerous prostate, and from other human cell lines are extracted following the procedure of Delli Bovi et al. (1986, Cancer Res. 46:6333-6338). The DNA is resuspended in a solution containing 0.05 M Tris HCl buffer, pH 7.8, and 0.1 mM EDTA, and the amount of DNA recovered is determined by microfluorometry using Hoechst 33258 dye. Cesarone, C. et al., Anal Biochem 100:188-197 (1979).

[0342] Polymerase chain reaction (PCR) is performed using Taq polymerase following the conditions recommended by the manufacturer (Perkin Elmer Cetus) with regard to buffer, Mg²⁺, and nucleotide concentrations. Thermocycling is performed in a DNA cycler by denaturation at 94° C. for 3 min. followed by either 35 or 50 cycles of 94° C. for 1.5 min., 50° C. for 2 min. and 72° C. for 3 min. The ability of the PCR to amplify the selected regions of the CA gene is tested by using a cloned CA polynucleotide(s) as a positive template(s). Optimal Mg²⁺, primer concentrations and requirements for the different cycling temperatures are determined with these templates. The master mix recommended by the manufacturer is used. To detect possible contamination of the master mix components, reactions without template are routinely tested.

[0343] Southern blotting and hybridization are performed as described by Southern, E. M., (J. Mol. Biol. 98:503-517, 1975), using the cloned sequences labeled by the random primer procedure (Feinberg, A. P., et al., 1983, Anal. Biochem. 132:6-13). Prehybridization and hybridization are performed in a solution containing 6×SSPE, 5% Denhardt's, 0.5% SDS, 50% formamide, 100 μg/ml denaturated salmon testis DNA, incubated for 18 hrs at 42° C., followed by washings with 2×SSC and 0.5% SDS at room temperature and at 37° C. and finally in 0.1×SSC with 0.5% SDS at 68° C. for 30 min (Sambrook et al., 1989, in “Molecular Cloning: A Laboratory Manual”, Cold Spring Harbor Lab. Press). For paraffin-embedded tissue sections the conditions described by Wright and Manos (1990, in “PCR Protocols”, Innis et al., eds., Academic Press, pp. 153-158) are followed using primers designed to detect a 250 bp sequence.

### (d) Example 5

### Detection of CA Sequences in Human Cancer Cells and Tissues

[0344] DNA from human cancer tissues, normal human tissues and from other human cell lines is extracted following the procedure of Delli Bovi et al. (1986, Cancer Res. 46:6333-6338). The DNA is resuspended in a solution containing 0.05 M Tris HCl buffer, pH 7.8, and 0.1 mM EDTA, and the amount of DNA recovered is determined by microfluorometry using Hoechst 33258 dye. Cesarone, C. et al., Anal Biochem 100:188-197 (1979).

[0345] Polymerase chain reaction (PCR) is performed using Taq polymerase following the conditions recommended by the manufacturer (Perkin Elmer Cetus) with regard to buffer, Mg²⁺, and nucleotide concentrations. Thermocycling is performed in a DNA cycler by denaturation at 94° C. for 3 min. followed by either 35 or 50 cycles of 94° C. for 1.5 min., 50° C. for 2 min. and 72° C. for 3 min. The ability of the PCR to amplify the selected regions of CA genes is tested by using a cloned CA polynucleotide(s) as a positive template(s). Optimal Mg²⁺, primer concentrations and requirements for the different cycling temperatures are determined with these templates. The master mix recommended by the manufacturer is used. To detect possible contamination of the master mix components, reactions without template are routinely tested.

[0346] Southern blotting and hybridization are performed as described by Southern, E. M., (J. Mol. Biol. 98:503-517, 1975), using the cloned sequences labeled by the random primer procedure (Feinberg, A. P., et al., 1983, Anal. Biochem. 132:6-13). Prehybridization and hybridization are performed in a solution containing 6×SSPE, 5% Denhardt's, 0.5% SDS, 50% formamide, 100 μg/ml denaturated salmon testis DNA, incubated for 18 hrs at 42° C., followed by washings with 2×SSC and 0.5% SDS at room temperature and at 37° C. and finally in 0.1×SSC with 0.5% SDS at 68° C. for 30 min (Sambrook et al., 1989, in “Molecular Cloning: A Laboratory Manual”, Cold Spring Harbor Lab. Press). For paraffin-embedded tissue sections the conditions described by Wright and Manos (1990, in “PCR Protocols”, Innis et al., eds., Academic Press, pp. 153-158) are followed using primers designed to detect a 250 bp sequence.

### (e) Example 6

### Expression of Cloned Polynucleotides in Host Cells

[0347] To study the protein products of CA genes, restriction fragments from CA DNA are cloned into the expression vector pMT2 (Sambrook, et al., Molecular Cloning: A Laboratory Manual, Cold Spring Harbor Laboratory Press pp 16.17-16.22 (1989)) and transfected into COS cells grown in DMEM supplemented with 10% FCS. Transfections are performed employing calcium phosphate techniques (Sambrook, et al. (1989) pp. 16.32-16.40, supra) and cell lysates are prepared forty-eight hours after transfection from both transfected and untransfected COS cells. Lysates are subjected to analysis by immunoblotting using anti-peptide antibody.

[0348] In immunoblotting experiments, preparation of cell lysates and electrophoresis are performed according to standard procedures. Protein concentration is determined using BioRad protein assay solutions. After semi-dry electrophoretic transfer to nitrocellulose, the membranes are blocked in 500 mM NaCl, 20 mM Tris, pH 7.5, 0.05% Tween-20 (TTBS) with 5% dry milk. After washing in TTBS and incubation with secondary antibodies (Amersham), enhanced chemiluminescence (ECL) protocols (Amersham) are performed as described by the manufacturer to facilitate detection.

### (f) Example 7

### Generation of Antibodies Against Polypeptides

[0349] Polypeptides, unique to CA genes are synthesized or isolated from bacterial or other (e.g., yeast, baculovirus) expression systems and conjugated to rabbit serum albumin (RSA) with m-maleimido benzoic acid N-hydroxysuccinimide ester (MBS) (Pierce, Rockford, Ill.). Immunization protocols with these peptides are performed according to standard methods. Initially, a pre-bleed of the rabbits is performed prior to immunization. The first immunization includes Freund's complete adjuvant and 500 μg conjugated peptide or 100 μg purified peptide. All subsequent immunizations, performed four weeks after the previous injection, include Freund's incomplete adjuvant with the same amount of protein. Bleeds are conducted seven to ten days after the immunizations.

[0350] For affinity purification of the antibodies, the corresponding CA polypeptide is conjugated to RSA with MBS, and coupled to CNBr-activated Sepharose (Pharmacia, Uppsala, Sweden). Antiserum is diluted 10-fold in 10 mM Tris-HCl, pH 7.5, and incubated overnight with the affinity matrix. After washing, bound antibodies are eluted from the resin with 100 mM glycine, pH 2.5.

### (g) Example 8

### Generation of Monoclonal Antibodies Against a CA Polypeptide

[0351] A non-denaturing adjuvant (Ribi, R730, Corixa, Hamilton Mont.) is rehydrated to 4 ml in phosphate buffered saline. 100 μl of this rehydrated adjuvant is then diluted with 400 μl of Hank's Balanced Salt Solution and this is then gently mixed with the cell pellet used for immunization. Approximately 500 μg conjugated peptide or 100 μg purified peptide and Freund's complete are injected into Balb/c mice via foot-pad, once a week. After 6 weeks of weekly injection, a drop of blood is drawn from the tail of each immunized animal to test the titer of antibodies against CA polypeptides using FACS analysis. When the titer reaches at least 1:2000, the mice are sacrificed in a CO₂ chamber followed by cervical dislocation. Lymph nodes are harvested for hybridoma preparation. Lymphocytes from mice with the highest titer are fused with the mouse myeloma line X63-Ag8.653 using 35% polyethylene glycol 4000. On day 10 following the fusion, the hybridoma supernatants are screened for the presence of CAP-specific monoclonal antibodies by fluorescence activated cell sorting (FACS). Conditioned medium from each hybridoma is incubated for 30 minutes with a combined aliquot of PC3, Colo-205, LnCap, or Panc-1 cells. After incubation, the cell samples are washed, resuspended in 0.1 ml diluent and incubated with 1 μg/ml of FITC conjugated F(ab′)2 fragment of goat anti-mouse IgG for 30 min at 4° C. The cells are washed, resuspended in 0.5 ml FACS diluent and analyzed using a FACScan cell analyzer (Becton Dickinson; San Jose, Calif.). Hybridoma clones are selected for further expansion, cloning, and characterization based on their binding to the surface of one or more of cell lines which express the CA polypeptide as assessed by FACS. A hybridoma making a monoclonal antibody designated mAbCA which binds an antigen designated Ag-CA.x and an epitope on that antigen designated Ag-CA.x.1 is selected.

### (h) Example 9

### ELISA Assay for Detecting CA Related Antigens

[0352] To test blood samples for antibodies that bind specifically to recombinantly produced CA antigens, the following procedure is employed. After a recombinant CA related protein is purified, the recombinant protein is diluted in PBS to a concentration of 5 μg/ml (500 ng/100 μl). 100 microliters of the diluted antigen solution is added to each well of a 96-well Immulon 1 plate (Dynatech Laboratories, Chantilly, Va.), and the plate is then incubated for 1 hour at room temperature, or overnight at 4° C., and washed 3 times with 0.05% Tween 20 in PBS. Blocking to reduce nonspecific binding of antibodies is accomplished by adding to each well 200 μl of a 1% solution of bovine serum albumin in PBS/Tween 20 and incubation for 1 hour. After aspiration of the blocking solution, 100 μl of the primary antibody solution (anticoagulated whole blood, plasma, or serum), diluted in the range of 1/16 to 1/2048 in blocking solution, is added and incubated for 1 hour at room temperature or overnight at 4° C. The wells are then washed 3 times, and 100 μl of goat anti-human IgG antibody conjugated to horseradish peroxidase (Organon Teknika, Durham, N.C.), diluted 1/500 or 1/1000 in PBS/Tween 20, 100 μl of o-phenylenediamine dihydrochloride (OPD, Sigma) solution is added to each well and incubated for 5-15 minutes. The OPD solution is prepared by dissolving a 5 mg OPD tablet in 50 ml 1% methanol in H₂O and adding 50 μl 30% H₂O₂ immediately before use. The reaction is stopped by adding 25 l of 4M H₂SO₄. Absorbances are read at 490 nm in a microplate reader (Bio-Rad).

### (i) Example 10

### Identification and Characterization of CA Antigen on Cancer Cell Surface

[0353] A cell pellet of proximately 25 ul packed cell volume of a cancer cell preparation is lysed by first diluting the cells to 0.5 ml in water followed by freezing and thawing three times. The solution is centrifuged at 14,000 rpm. The resulting pellet, containing the cell membrane fragments, is resuspended in 50 μl of SDS sample buffer (Invitrogen, Carlsbad, Calif.). The sample is heated at 80° C. for 5 minutes and then centrifuged for 2 minutes at 14,000 rpm to remove any insoluble materials.

[0354] The samples are analyzed by Western blot using a 4 to 20% polyacrylamide gradient gel in Tris-Glycine SDS (Invitrogen; Carlsbad Calif.) following the manufacturer's directions. Ten microliters of membrane sample are applied to one lane on the polyacrylamide gel. A separate 10 μL sample is reduced first by the addition of 2 μL of dithiothreitol (100 mM) with heating at 80° C. for 2 minutes and then loaded into another lane. Pre-stained molecular weight markers SeeBlue Plus2 (Invitrogen; Carlsbad, Calif.) are used to assess molecular weight on the gel. The gel proteins are transferred to a nitrocellulose membrane using a transfer buffer of 14.4 g/l glycine, 3 g/l of Tris Base, 10% methanol, and 0.05% SDS. The membranes are blocked, probed with a CAP-specific monoclonal antibody (at a concentration of 0.5 ug/ml), and developed using the Invitrogen WesternBreeze Chromogenic Kit-AntiMouse according to the manufacturer's directions. In the reduced sample of the tumor cell membrane samples, a prominent band is observed migrating at a molecular weight within about 10% of the predicted molecular weight of the corresponding CA protein.

### (j) Example 11

### Preparation of Vaccines

[0355] The present invention also relates to a method of stimulating an immune response against cells that express CA polypeptides in a patient using CA polypeptides of the invention that act as an antigen produced by or associated with a malignant cell. This aspect of the invention provides a method of stimulating an immune response in a human against cancer cells or cells that express CA polynucleotides and polypeptides. The method comprises the step of administering to a human an immunogenic amount of a polypeptide comprising: (a) the amino acid sequence of a huma CA protein or (b) a mutein or variant of a polypeptide comprising the amino acid sequence of a human endogenous retrovirus CA protein.

### (k) Example 12

### Generation of Transgenic Animals Expressing Polypeptides as a Means for Testing Therapeutics

[0356] CA nucleic acids are used to generate genetically modified non-human animals, or site specific gene modifications thereof, in cell lines, for the study of function or regulation of prostate tumor-related genes, or to create animal models of diseases, including prostate cancer. The term “transgenic” is intended to encompass genetically modified animals having an exogenous CA gene(s) that is stably transmitted in the host cells where the gene(s) may be altered in sequence to produce a modified protein, or having an exogenous CA LTR promoter operably linked to a reporter gene. Transgenic animals may be made through a nucleic acid construct randomly integrated into the genome. Vectors for stable integration include plasmids, retroviruses and other animal viruses, YACs, and the like. Of interest are transgenic mammals, e.g. cows, pigs, goats, horses, etc., and particularly rodents, e.g. rats, mice, etc.

[0357] The modified cells or animals are useful in the study of CA gene function and regulation. For example, a series of small deletions and/or substitutions may be made in the CA genes to determine the role of different genes in tumorigenesis. Specific constructs of interest include, but are not limited to, antisense constructs to block CA gene expression, expression of dominant negative CA gene mutations, and over-expression of a CA gene. Expression of a CA gene or variants thereof in cells or tissues where it is not normally expressed or at abnormal times of development is provided. In addition, by providing expression of proteins derived from CA in cells in which it is otherwise not normally produced, changes in cellular behavior can be induced.

[0358] DNA constructs for random integration need not include regions of homology to mediate recombination. Conveniently, markers for positive and negative selection are included. For various techniques for transfecting mammalian cells, see Keown et al., Methods in Enzymology 185:527-537 (1990).

[0359] For embryonic stem (ES) cells, an ES cell line is employed, or embryonic cells are obtained freshly from a host, e.g. mouse, rat, guinea pig, etc. Such cells are grown on an appropriate fibroblast-feeder layer or grown in the presence of appropriate growth factors, such as leukemia inhibiting factor (LIF). When ES cells are transformed, they may be used to produce transgenic animals. After transformation, the cells are plated onto a feeder layer in an appropriate medium. Cells containing the construct may be detected by employing a selective medium. After sufficient time for colonies to grow, they are picked and analyzed for the occurrence of integration of the construct. Those colonies that are positive may then be used for embryo manipulation and blastocyst injection. Blastocysts are obtained from 4 to 6 week old superovulated females. The ES cells are trypsinized, and the modified cells are injected into the blastocoel of the blastocyst. After injection, the blastocysts are returned to each uterine horn of pseudopregnant females. Females are then allowed to go to term and the resulting chimeric animals screened for cells bearing the construct. By providing for a different phenotype of the blastocyst and the ES cells, chimeric progeny can be readily detected.

[0360] The chimeric animals are screened for the presence of the modified gene and males and females having the modification are mated to produce homozygous progeny. If the gene alterations cause lethality at some point in development, tissues or organs are maintained as allogeneic or congenic grafts or transplants, or in in vitro culture. The transgenic animals may be any non-human mammal, such as laboratory animals, domestic animals, etc. The transgenic animals are used in functional studies, drug screening, etc., e.g. to determine the effect of a candidate drug on prostate cancer, to test potential therapeutics or treatment regimens, etc.

### (l) Example 13

### Diagnostic Imaging Using CA Specific Antibodies

[0361] The present invention encompasses the use of antibodies to CA polypeptides to accurately stage cancer patients at initial presentation and for early detection of metastatic spread of cancer. Radioimmunoscintigraphy using monoclonal antibodies specific for CA polypeptides can provide an additional cancer-specific diagnostic test. The monoclonal antibodies of the instant invention are used for histopathological diagnosis of carcinomas.

[0362] Subcutaneous human xenografts of cancer cells in nude mice is used to test whether a technetium-99m (^{99m}Tc)-labeled monoclonal antibody of the invention can successfully image the xenografted cancer by external gamma scintography as described for seminoma cells by Marks, et al., Brit. J. Urol. 75:225 (1995). Each monoclonal antibody specific for a CA polypeptide is purified from ascitic fluid of BALB/c mice bearing hybridoma tumors by affinity chromatography on protein A-Sepharose. Purified antibodies, including control monoclonal antibodies such as an avidin-specific monoclonal antibody (Skea, et al., J. Immunol. 151:3557 (1993)) are labeled with ^{99m}Tc following reduction, using the methods of Mather, et al., J. Nucl. Med. 31:692 (1990) and Zhang et al., Nucl. Med. Biol. 19:607 (1992). Nude mice bearing human cancer cells are injected intraperitoneally with 200-500 μCi of ^{99m}Tc-labeled antibody. Twenty-four hours after injection, images of the mice are obtained using a Siemens ZLC3700 gamma camera equipped with a 6 mm pinhole collimator set approximately 8 cm from the animal. To determine monoclonal antibody biodistribution following imaging, the normal organs and tumors are removed, weighed, and the radioactivity of the tissues and a sample of the injectate are measured. Additionally, CA-specific antibodies conjugated to antitumor compounds are used for cancer-specific chemotherapy.

### (m) Example 14

### Immunohistochemical Methods

[0363] Frozen tissue samples from cancer patients are embedded in an optimum cutting temperature (OCT) compound and quick-frozen in isopentane with dry ice. Cryosections are cut with a Leica 3050 CM mictrotome at thickness of 5 μm and thaw-mounted on vectabound-coated slides. The sections are fixed with ethanol at −20° C. and allowed to air dry overnight at room temperature. The fixed sections are stored at −80° C. until use. For immunohistochemistry, the tissue sections are retrieved and first incubated in blocking buffer (PBS, 5% normal goat serum, 0.1% Tween 20) for 30 minutes at room temperature, and then incubated with the CA protein-specific monoclonal antibody and control monoclonal antibodies diluted in blocking buffer (1 μg/ml) for 120 minutes. The sections are then washed three times with the blocking buffer. The bound monoclonal antibodies are detected with a goat anti-mouse IgG+IgM (H+ L) F(ab′)²-peroxidase conjugates and the peroxidase substrate diaminobenzidine (1 mg/ml, Sigma Catalog No. D 5637) in 0.1 M sodium acetate buffer pH 5.05 and 0.003% hydrogen peroxide (Sigma cat. No. H1009). The stained slides are counter-stained with hematoxylin and examined under Nikon microscope.

[0364] Monoclonal antibody against a CA protein (antigen) is used to test reactivity with various cell lines from different types of tissues. Cells from different established cell lines are removed from the growth surface without using proteases, packed and embedded in OCT compound. The cells are frozen and sectioned, then stained using a standard IHC protocol. The CellArray™ technology is described in WO 01/43869. Normal tissue (human) obtained by surgical resection are frozen and mounted. Cryosections are cut with a Leica 3050 CM mictrotome at thickness of 5 μm and thaw-mounted on vectabound-coated slides. The sections are fixed with ethanol at −20° C. and allowed to air dry overnight at room temperature. PolyMICA™ Detection kit is used to determine binding of a CA-specific monoclonal antibody to normal tissue. Primary monoclonal antibody is used at a final concentration of 1 μg/ml.

[0365] All publications and patent applications cited in this specification are herein incorporated by reference as if each individual publication or patent application were specifically and individually indicated to be incorporated by reference.

[0366] Although the foregoing invention has been described in some detail by way of illustration and example for purposes of clarity of understanding, it will be readily apparent to those of ordinary skill in the art in light of the teachings of this invention that certain changes and modifications may be made thereto without departing from the spirit or scope of the appended claims.

What is claimed is:

1. An isolated nucleic acid comprising at least 10 contiguous nucleotides of a sequence selected from the group consisting of the polynucleotide sequences of SEQ ID NOS: 5, 7, 9, 17, 19, 27, 29, 35, 37, 43, 45, 47, 49, 55, 57, 59, 61, 63, 71, 73, 75, 81, 83, 85, 87, 93, 109, 115, 121, 123, 125, 131, 135, 137, 143, 149, 151, 153, 155, 157, 159, 161, 163, 165, and 167 shown in Tables 1-15, or its complement.

2. A host cell comprising a recombinant nucleic acid of claim 1.

3. An expression vector comprising the isolated nucleic acid according to claim 1.

4. A host cell comprising the expression vector of claim 3.

5. The polynucleotide according to claim 1, wherein said polynucleotide, or its complement or a fragment thereof, further comprises a detectable label.

6. The polynucleotide according to claim 1, wherein said polynucleotide, or its complement or a fragment thereof, is attached to a solid support.

7. The polynucleotide according to claim 1, wherein said polynucleotide, or its complement or a fragment thereof, is prepared at least in part by chemical synthesis.

8. The polynucleotide according to claim 1, wherein said polynucleotide, or its complement or a fragment thereof, is an antisense fragment.

9. The polynucleotide according to claim 1, wherein said polynucleotide, or its complement or a fragment thereof, is single stranded.

10. The polynucleotide according to claim 1, wherein said polynucleotide, or its complement or a fragment thereof, is double stranded.

11. The polynucleotide according to claim 1, comprising at least 15 contiguous nucleotides.

12. The polynucleotide according to claim 1, comprising at least 20 contiguous nucleotides.

13. A microarray for detecting a cancer associated (CA) nucleic acid comprising:
at least one probe comprising at least 10 contiguous nucleotides of a sequence selected from the group consisting of the polynucleotide sequences SEQ ID NOS: 5, 7, 9, 17, 19, 27, 29, 35, 37, 43, 45, 47, 49, 55, 57, 59, 61, 63, 71, 73, 75, 81, 83, 85, 87, 93, 109, 115, 121, 123, 125, 131, 135, 137, 143, 149, 151, 153, 155, 157, 159, 161, 163, 165, and 167 shown in Tables 1-15, or its complement.

14. The microarray according to claim 13, comprising at least 15 contiguous nucleotides.

15. The microarray according to claim 13, comprising at least 20 contiguous nucleotides.

16. An isolated polypeptide, encoded within an open reading frame of a CA sequence selected from the group consisting of the polynucleotide sequences of SEQ ID NOS: 4, 16, 26, 34, 42, 54, 70, 80, 92, 108, 114, 120, 130, 142, and 148 shown in Tables 1-15, or its complement.

17. The polypeptide of claim 16, wherein said polypeptide comprises the amino acid sequence encoded by a polynucleotide selected from the group consisting of SEQ ID NOS: 5, 7, 9, 17, 19, 27, 29, 35, 37, 43, 45, 47, 49, 55, 57, 59, 61, 63, 71, 73, 75, 81, 83, 85, 87, 93, 109, 115, 121, 123, 125, 131, 135, 137, 143, 149, 151, 153, 155, 157, 159, 161, 163, 165, and 167 shown in Tables 1-15.

18. The polypeptide of claim 16, wherein said polypeptide comprises the amino acid sequence encoded by a polypeptide selected from the group consisting of SEQ ID NOS: 6, 8, 10, 18, 20, 28, 30, 36, 38, 44, 46, 48, 50, 56, 58, 60, 62, 64, 72, 74, 76, 82, 84, 86, 88, 94, 110, 116, 122, 124, 126, 132, 134, 136, 138, 144, 150, 152, 154, 156, 158, 160, 162, 164, 166, and 168 shown in Tables 1-15.

19. The polypeptide of claim 16, wherein said polypeptide comprises the amino acid sequence of an epitope of the amino acid sequence of a CA polypeptide selected from the group consisting of SEQ ID NOS: 6, 8, 10, 18, 20, 28, 30, 36, 38, 44, 46, 48, 50, 56, 58, 60, 62, 64, 72, 74, 76, 82, 84, 86, 88, 94, 110, 116, 122, 124, 126, 132, 134, 136, 138, 144, 150, 152, 154, 156, 158, 160, 162, 164, 166, and 168 shown in Tables 1-15.

20. The polypeptide of claim 16, wherein said polypeptide is expressed on a cell surface, wherein the CA protein selected from the group consisting of SEQ ID NOS: 6, 8, 10, 18, 20, 28, 30, 36, 38, 44, 46, 48, 50, 56, 58, 60, 62, 64, 72, 74, 76, 82, 84, 86, 88, 94, 110, 116, 122, 124, 126, 132, 134, 136, 138, 144, 150, 152, 154, 156, 158, 160, 162, 164, 166, and 168.

21. The polypeptide of claim 16, wherein said polypeptide or fragment thereof is attached to a solid support.

22. An isolated antibody or antigen binding fragment thereof, that binds to a polypeptide according to any one of claims 16-20.

23. The isolated antibody or antigen binding fragment thereof according the claim 22, wherein said antibody or fragment thereof is attached to a solid support.

24. The isolated antibody or antigen binding fragment thereof according the claim 22, wherein said antibody is a monoclonal antibody.

25. The isolated antibody or antigen binding fragment thereof according the claim 22, wherein said antibody is a polyclonal antibody.

26. The isolated antibody or antigen binding fragment thereof according the claim 22, wherein said antibody or fragment thereof further comprises a detectable label.

27. An isolated antibody that binds to a polypeptide, or antigen binding fragment thereof, according to any of claims 16-20, prepared by a method comprising the steps of: (i) immunizing a host animal with a composition comprising said polypeptide, or antigen binding fragment thereof, and (ii) collecting cells from said host expressing antibodies against the antigen or antigen binding fragment thereof.

28. The monoclonal antibody according to claim 24, wherein the monoclonal antibody binds to the extracellular domain of the CA protein.

29. The monoclonal antibody according to claim 24, wherein the monoclonal antibody binds to at least one human cancer cell line.

30. The monoclonal antibody according to claim 24, wherein the monoclonal antibody is prepared by a process comprising:
(a) providing a hybridoma capable of producing the monoclonal antibody; and
(b) culturing the hybridoma under conditions that provide for the production of the monoclonal antibody by the hybridoma.

31. A hybridoma that produces the monoclonal antibody according to claim 24.

32. The antibody according to claim 22, wherein the antibody is a humanized antibody.

33. The antibody according to claim 22, wherein the CAP is expressed on a cancer cell surface but not on a normal cell surface.

34. The antibody according to claim 22, wherein the CAP is differentially expressed on a cancer cell surface relative to a normal cell surface.

35. The antibody according to claim 22, wherein the antibody is linked to a therapeutic agent.

36. The antibody according to claim 24, wherein the antibody is linked to a therapeutic agent.

37. A pharmaceutical composition comprising the antibody according to claim 22 and a pharmaceutically acceptable excipient.

38. A pharmaceutical composition comprising the antibody according to claim 35 and a pharmaceutically acceptable excipient.

39. A pharmaceutical composition comprising the antibody according to claim 36 and a pharmaceutically acceptable excipient.

40. A kit for detecting cancer cells comprising the antibody according to claim 22.

41. A kit for detecting cancer cells comprising the monoclonal antibody according to claim 24.

42. A method for detecting a presence or an absence of cancer cells in an individual, the method comprising:
contacting cells from the individual with the antibody according to any of claims 22 or 24;
and detecting a complex of a CAP from the cancer cells and the antibody,
wherein detection of the complex correlates with the presence of cancer cells in the individual.

43. A method for inhibiting growth of cancer cells in an individual, the method comprising: administering to the individual an effective amount of a pharmaceutical composition according to any of claims 37, 38, or 39.

44. A method for delivering a therapeutic agent to cancer cells in an individual, the method comprising: administering to the individual an effective amount of a pharmaceutical composition according to any of claims 37, 38, or 39.

45. A kit for diagnosing the presence of cancer in a test sample, said kit comprising at least one polynucleotide that selectively hybridizes to a CA polynucleotide sequence selected from the group consisting of the polynucleotide sequences SEQ ID NOS: 4, 16, 26, 34, 42, 54, 70, 80, 92, 108, 114, 120, 130, 142, and 148 shown in Tables 1-15, or its complement.

46. A kit for diagnosing the presence of cancer in a test sample, said kit comprising at least one polynucleotide that selectively hybridizes to the sequence of a polynucleotide sequence selected from the group consisting of the polynucleotide sequences SEQ ID NOS: 5, 7, 9, 17, 19, 27, 29, 35, 37, 43, 45, 47, 49, 55, 57, 59, 61, 63, 71, 73, 75, 81, 83, 85, 87, 93, 109, 115, 121, 123, 125, 131, 135, 137, 143, 149, 151, 153, 155, 157, 159, 161, 163, 165, and 167 shown in Tables 1-15, a fragment thereof, or their complement.

47. An electronic library comprising a polynucleotide, or fragment thereof, comprising a CA polynucleotide sequence selected from the group consisting of the polynucleotide sequences of SEQ ID NOS: 4, 16, 26, 34, 42, 54, 70, 80, 92, 108, 114, 120, 130, 142, and 148 shown in Tables 1-15, or its complement.

48. An electronic library comprising a polynucleotide, or fragment thereof, comprising a CA polynucleotide sequence selected from the group consisting of the polynucleotide sequences of SEQ ID NOS: 5, 7, 9, 17, 19, 27, 29, 35, 37, 43, 45, 47, 49, 55, 57, 59, 61, 63, 71, 73, 75, 81, 83, 85, 87, 93, 109, 115, 121, 123, 125, 131, 135, 137, 143, 149, 151, 153, 155, 157, 159, 161, 163, 165, and 167 shown in Tables 1-15.

49. An electronic library comprising a polypeptide, or fragment thereof, comprising a CA polypeptide sequence selected from the group consisting of the polypeptide sequences of SEQ ID NOS: 6, 8, 10, 18, 20, 28, 30, 36, 38, 44, 46, 48, 50, 56, 58, 60, 62, 64, 72, 74, 76, 82, 84, 86, 88, 94, 110, 116, 122, 124, 126, 132, 134, 136, 138, 144, 150, 152, 154, 156, 158, 160, 162, 164, 166, and 168 shown in Tables 1-15.

50. A method of screening for anticancer activity comprising:
(a) providing a cell that expresses a cancer associated (CA) gene encoded by a nucleic acid sequence selected from the group consisting of the sequences SEQ ID NOS: 4, 16, 26, 34, 42, 54, 70, 80, 92, 108, 114, 120, 130, 142, and 148 shown in Tables 1-15, or fragment thereof;
(b) contacting a tissue sample derived from a cancer cell with an anticancer drug candidate; and
(c) monitoring an effect of the anticancer drug candidate on an expression of the CA polynucleotide in the tissue sample.

51. The method of screening for anticancer activity according to claim 50, wherein the CA gene comprises at least one nucleic acid sequence selected from the group consisting of the sequences SEQ ID NOS: 5, 7, 9, 17, 19, 27, 29, 35, 37, 43, 45, 47, 49, 55, 57, 59, 61, 63, 71, 73, 75, 81, 83, 85, 87, 93, 109, 115, 121, 123, 125, 131, 135, 137, 143, 149, 151, 153, 155, 157, 159, 161, 163, 165, and 167 shown in Tables 1-15.

52. The method of screening for anticancer activity according to claim 50, further comprising:
(d) comparing the level of expression in the absence of said drug candidate to the level of expression in the presence of the drug candidate.

53. The method of screening for anticancer activity according to claim 51, wherein the drug candidate is an inhibitor of transcription and further wherein the nucleic acid sequence is selected from the group consisting of SEQ ID NOS: 5, 7, 9, 17, 19, 27, 29, 35, 37, 43, 45, 47, 49, 55, 57, 59, 61, 63, 71, 73, 75, 81, 83, 85, 87, 93, 109, 115, 121, 123, 125, 131, 135, 137, 143, 149, 151, 153, 155, 157, 159, 161, 163, 165, and 167 shown in Tables 1-15.

54. A method for detecting cancer associated with expression of a polypeptide in a test cell sample, comprising the steps of:
(i) detecting a level of expression of at least one polypeptide selected from the group consisting of SEQ ID NOS: 6, 8, 10, 18, 20, 28, 30, 36, 38, 44, 46, 48, 50, 56, 58, 60, 62, 64, 72, 74, 76, 82, 84, 86, 88, 94, 110, 116, 122, 124, 126, 132, 134, 136, 138, 144, 150, 152, 154, 156, 158, 160, 162, 164, 166, and 168 shown in Tables 1-15, or a fragment thereof; and
(ii) comparing the level of expression of the polypeptide in the test sample with a level of expression of polypeptide in a normal cell sample, wherein an altered level of expression of the polypeptide in the test cell sample relative to the level of polypeptide expression in the normal cell sample is indicative of the presence of cancer in the test cell sample.

55. A method for detecting cancer associated with expression of a polypeptide in a test cell sample, comprising the steps of:
(i) detecting a level of activity of at least one polypeptide selected from the group consisting of SEQ ID NOS: 6, 8, 10, 18, 20, 28, 30, 36, 38, 44, 46, 48, 50, 56, 58, 60, 62, 64, 72, 74, 76, 82, 84, 86, 88, 94, 110, 116, 122, 124, 126, 132, 134, 136, 138, 144, 150, 152, 154, 156, 158, 160, 162, 164, 166, and 168 shown in Tables 1-15, or a fragment thereof, wherein said activity corresponds to at least one activity for the polypeptide listed in Table 17; and
(ii) comparing the level of activity of the polypeptide in the test sample with a level of activity of polypeptide in a normal cell sample, wherein an altered level of activity of the polypeptide in the test cell sample relative to the level of polypeptide activity in the normal cell sample is indicative of the presence of cancer in the test cell sample.

56. A method for detecting cancer associated with the presence of an antibody in a test serum sample, comprising the steps of:
(i) detecting a level of an antibody against an antigenic polypeptide selected from the group consisting of SEQ ID NOS: 6, 8, 10, 18, 20, 28, 30, 36, 38, 44, 46, 48, 50, 56, 58, 60, 62, 64, 72, 74, 76, 82, 84, 86, 88, 94, 110, 116, 122, 124, 126, 132, 134, 136, 138, 144, 150, 152, 154, 156, 158, 160, 162, 164, 166, and 168 shown in Tables 1-15, or antigenic fragment thereof; and
(ii) comparing said level of said antibody in the test sample with a level of said antibody in the control sample, wherein an altered level of antibody in said test sample relative to the level of antibody in the control sample is indicative of the presence of cancer in the test serum sample.

57. A method for screening for a bioactive agent capable of modulating the activity of a CA protein (CAP), wherein said CAP is encoded by a nucleic acid comprising a nucleic acid sequence selected from the group consisting of the polynucleotide sequences SEQ ID NOS: 5, 7, 9, 17, 19, 27, 29, 35, 37, 43, 45, 47, 49, 55, 57, 59, 61, 63, 71, 73, 75, 81, 83, 85, 87, 93, 109, 115, 121, 123, 125, 131, 135, 137, 143, 149, 151, 153, 155, 157, 159, 161, 163, 165, and 167 shown in Tables 1-15, said method comprising:
a) combining said CAP and a candidate bioactive agent; and
b) determining the effect of the candidate agent on the bioactivity of said CAP.

58. The method of screening for the bioactive agent according to claim 57, wherein the bioactive agent affects the expression of the CA protein (CAP).

59. The method of screening for the bioactive agent according to claim 57, wherein the bioactive agent affects the activity of the CA protein (CAP), wherein such activity is selected from the activities listed in Table 17.

60. The method of screening for the bioactive agent according to claim 57, wherein the bioactive agent is a modulator of an activity selected from the group consisting of: sialyl transferase, tumor suppressor, low density lipoprotein receptor, calcium binding, cell adhesion, signalling, protein kinase receptor, and signal transduction.

61. A method for diagnosing cancer comprising:
a) determining the expression of one or more genes comprising a nucleic acid sequence selected from the group consisting of the human genomic and mRNA sequences outlined in Tables 1-15, in a first tissue type of a first individual; and
b) comparing said expression of said gene(s) from a second normal tissue type from said first individual or a second unaffected individual;
wherein a difference in said expression indicates that the first individual has cancer.

62. A method for treating cancers comprising administering to a patient an inhibitor of a CA protein (CAP), wherein said CAP is encoded by a nucleic acid comprising a nucleic acid sequence selected from the group consisting of the human nucleic acid sequences in Tables 1-15.

63. The method for treating cancers according to claim 62, wherein the inhibitor of a CA protein (CAP) binds to the CA protein.

64. The method for treating cancers according to claim 62, wherein the inhibitor is a sialyl transferase inhibitor and further wherein the CAP sequence is selected from the group consisting of SEQ ID NOS: 132, 134, 136, and 138 shown in Tables 1-15.

65. The method for treating cancers according to claim 62, wherein the inhibitor is a low density lipoprotein receptor antagonist and further wherein the CAP sequence is selected from the group consisting of SEQ ID NOS: 28, 30, 44, 46, 48, 50, 122, 122, and 124 shown in Tables 1-15.

66. The method for treating cancers according to claim. 62, wherein the inhibitor is a tumor suppressor protein antagonist and further wherein the CAP sequence is selected from the group consisting of SEQ ID NOS: 84, 86, and 88 shown in Tables 1-15.

67. The method for treating cancers according to claim 62, wherein the inhibitor of a CA protein (CAP) is a calcium binding protein antagonist and further wherein the CAP sequence is selected from the group consisting of SEQ ID NOS: 44, 46, 48, 50, 122, 124, 150, 152, 154, 156, 158, 160, 162, 164, 166, and 168 shown in Tables 1-15.

68. The method for treating cancers according to claim 62, wherein the inhibitor is a protein kinase receptor antagonist and further wherein the CAP sequence is selected from the group consisting of SEQ ID NOS: 72, 74 and 76 shown in Tables 1-15.

69. The method for treating cancers according to claim 62, wherein the inhibitor is an modulator of cell adhesion and further wherein the CAP sequence is selected from the group consisting of SEQ ID NOS: 56, 58, 60, 62, 64, 84, 86, 88, 150, 152, 154, 156, 158, 160, 162, 164, 166, and 168 shown in Tables 1-15.

70. The method for treating cancers according to claim 62, wherein the inhibitor is a modulator of signalling or signal transduction and further wherein the CAP sequence is selected from the group consisting of SEQ ID NOS: 28, 30, 38, 44, 46, 48, 50, 56, 58, 60, 62, 64, 72, 74, 76, 94, 116, and 144 shown in Tables 1-15.

71. A method for inhibiting expression of a cancer associated (CA) gene in a cell comprising:
contacting a cell expressing a CA gene with a double stranded RNA comprising a sequence capable of hybridizing to a cancer associated (CA) mRNA corresponding to the polynucleotide sequences of SEQ ID NOS: 5, 7, 9, 17, 19, 27, 29, 35, 37, 43, 45, 47, 49, 55, 57, 59, 61, 63, 71, 73, 75, 81, 83, 85, 87, 93, 109, 115, 121, 123, 125, 131, 135, 137, 143, 149, 151, 153, 155, 157, 159, 161, 163, 165, and 167 shown in Tables 1-15, in an amount sufficient to elicit RNA interference; and
inhibiting expression of the CA gene in the cell.

72. The method of claim 71, wherein the double stranded RNA is provided by introducing a short interfering RNA (siRNA) into the cell by a method selected from the group consisting of transfection, electroporation, and microinjection.

73. The method of claim 71, wherein the double stranded RNA is provided by introducing a short interfering RNA (siRNA) into the cell by an expression vector.

The application's sequence listing, which the Patent Office published only in electronic form, follows.

SEQUENCE LISTING (168 sequences)

SEQ ID NO: 1 - DNA, 754086 bp, Mus musculus
  misc_feature (1)...(754086): n = A,T,C or G
tctcatcctccttccttccctccttccccatctcttgtttttccatcatatattacatattgactgcagtttcctcttcttcctctcctccaagtctgtcactcctctctccccacgacacgcaccgccccccccccccccatccactcctcctccgtttctcttcagaaacagcgggcctcagagttatcaaccaaacatgacacatcaagtttcaacaatactaggcgtctccctcaattttaaggctgggcgaggcaatctagtttgaagtcacttgctttcattaagaccaagactcaagctttgccagatgagtctcttccttaagcgcctcgaagttctatatttccagcaatggccagcagagggcagcattgcaccacggctgctctgggcgggctagctggttcagcttgacaactgcggctgcgctggtgggttccctgaattgtcctggttgcaggagttggggtagggggtggtgtgttcgagagcgggagatcacggtctccattctgcttggggcttttctgtgcctggtgctccttcacgggttaaccgagttccggttgtcctctgaggatgcttatttccatttgagggcttgcagtcctaagaacagctcacctcagaggggcgcgtcttatgctttataaacttacgctttatgtcttttctcctggaagtctctcctgatctttttgttcatccctgctggggcatccctgctatcagtttccttccaccctgtttccagaggaaggtcttgtttcccttgcacctatccaaggtcactgccgcccctaagctctggatctaagatcagcatgtctgtctgtcccacccagtatgcctcttaacaggtgaccagcttcattgaaggatgtcatcattagtggttagggtcctaagatcttcaggaatccaggcttcttgtcttaggcagcctcgttcccatgcttcgttcctcccgtccctcttcctgaggggattgaacactgaccaaaggacgtcatcaacaccacatgtggtacctacaacaaaagaataggtgccaggaacttttggaaggggaccagccaaagaccccagactggcagagtcctcagtgttcctagggagtcgggaatgtgcttcgccgcagttttgagaaatacatgctcacttatcaggatggaggaaaaaaaaaaaagcaagaaagaaatgaataacgcctgtgtttgggacggggtagagacgatattttcattaattgtgtgcgggagtgtaaattggcttaaaaaacagctttggagtgtacagctttgggaattatacgttaaaaggcttaaatattttatagcctttcacctaataactccaattctgggcatttatcctaagaaaacaattgtataagagcagaaaatatatacacaaagatcttacagtagtattgtatgaccagttatatcaagtatgctctattctgtgggacaaaacctgatcagctactaaaaaccgtgttttcaggaaatttttattgagatgctaactgattgatttaacacaccagcatctcctgggtatgacagctactgttctgggtactagaaataaggcgtaagtaaaactccttcctctgtggagtttccggtcggctgtggtgctggctctagtgtgtggtaggcaggtgctctgccactggaagtcaagcaataagaaaattacacaatttctgtccttgaatagaaaaaaggacaggtcactcagcctggtgggataatctcataagcccagtgcttgggaggctgagacaggaggagcctgagtttgaagccaacttgggctacaaagtaagactcaaaacaaaacaaaacaaaacaaaacaaaactcctcaataaaacaataacaacatcagcagcagcagcagcagcaacaacaacaacaataataacaataacaacaacatcaagatggatgaatcatgaaatcactggttggtggtatcagcgaaggccggtagtctcttggcatggaaatgcctgcatggtagctaatgtgtgtggaggtacagctggctctggaactggggctcatgagcagcaagcttgtgggctagctcagggtcatccatgtgtggcttcttaaggtcctgacatgaccaatggcttctaagaccctgtatgttttccaggtaggcagaagagaaaacgcagggggcacggccatttattgagcggccatattttattcttcatgggcagagctttggccaacgtgtcatagccctgaaagacccccagagccacgcctggttgaaggaaggtcatggctatggtgttttgaattgtgggatgttcttttccacatgttctagaccaaaggagacatcgaaacaagctttttttttttttttttttgaatagaaacaaaaaagggctttctgtcttgaaagaaataaggtgggatggcttgctattagaaagtagggcagattgtctgcagtgtgtctcagatatacctgtcacctggtggctgtgtccagcagtctctcctgctgacccctgcctcccatggccttgtgccccacacaggctaaggggaagtggtggaaaaggtccaatggcagtttctcactaagagatgttccttgcctttcagcctattttctggcctccatatgagggcacacatggctgatgcttggggtatctgcaacctggactcatgtggggttgagcttccagggagctggagtgtgtccccaggcttggactaagctgctccaggtttgggctgcttctttttgttaatttgctttgttgttacatcactgaacttgagacaacatcttttccttttctctgttggttgggaagctgggtaaagtcagcccggtccctcttatccccatctgctgccctcttgtggcccccaagcacacttgcaaccacatagtatatacacattaaattaaaaatatgttttgtttttgtttttgtttttgtttttttcttctatgagtcctaacaggaggaaaaggcctttggccacctggctaccaggaaacatgggaaatttcccaccctgactctgtacaggatgctctctgacactcacacgttctctgctgtccccagagatgagcagcaggtatccctccatgaggtaggagcttggggatcagacgaccttggtccagcctgttccttgtctacaatggtgctcctgaaagcaccattgggaatattacatcctgatttggaaaaaaaaaaccatttgcaggtttaagtaagtttctgggcataaggagattgtcctgaattgtcaaaatgtcccctacacccaatcgtgaatgtctccttaaggctaagggaggctacacagatggtgtcactgtgtagcctgtgttgctacagaggcagggacaggctagtttagctagttgtgagccatgaaacagaacttggagaacagtgagtattcttgccactgagccatctttagacctttagtggctccttgacttccctgggatgcccaccgaagataccatggttgacaagtctttgctgcaaaatatggccacccaggatgcctgctctgttgatatggatctagaaaggtgtgtgtctggcttctgcatcgccaacaagaactattctggcaacttccatcatagtaccttccaatttatactttgctttccatgggcttttcttcccatcccttcctgtataggaaacacattgacattctaaactccagtcatcgtctcagcttaggatttgccgatccttcaggcagctgcaagaggagccctgggcagcagagagaagggctgagctctgggcattctctgtctagggttggctgggccatgcctgatgagggtgttggggcctgactttgtctctgaagtagacagacaggctagggttcaggtcccagccacttagtcctgttaaccacatagtgatgggacagcggtccccaaggtttaaaagggcagggatgcagatgcaagactggtagaatagagtggagaagctgtgctagccatcatggctgggaagctggggagtcagcaagtaacggggatagggcagggccagaccttgtgcttaggtgtggcctcaaaagtctgagtggcagcaggagacccgtattcattgttgggcttaggtgtcccaggagcatggacctgtcctgaagattccccatgcttgtagattgcagagcctccgattggaaggatgcaaacactgctcctccagaggctggcatgacagctcagaagggtgtgtctgggtgtgcccacaccttacttccctttgactgtccctttcaactcaagacatcattgtgcaaacttcacttttcttcttctttcagaaagcctgaaggaaggggtggatcttccagggacccaagggattaggaggttccagagcatttttgtgggagcctcagatggctctagttgtggtttgaccccgccgtcttcctgcccaaagcacccttctggatccagcactctagcctgctttttctccccccacaggtagcttcttggggtggttgattctaatcacactgcgtcttgttctgtataagggaatagatgaaggaaggccttttccttacaaagatgaggtgctcctgttggggtgtgatcacacaagacatgatcttttttttttctcctcattggcatgtggctcctgggctgccagccatggtgatgcctgcattatcgacagtgccctcagctgtgcgggtcctgccctgatgccgactcagcatcctgctcttgggaggaggctatccccagctgcactttctccagccacactgtcctccataaaactgaagactaaatcaatgaagcttcgaatcatgggataagtgagactagagattgctggcctgggaaatttgaaagtaaaaactcaagagaatgaccaagagggaaagcaaactaaaacaaaaacaaaacaaaacaaaacaaaacaaaacaaaacacagtcatataaaggatgatcaaataaatataagtactaaaaacgagatgagagaggttggcaaaagagacaaagcagagctgggtcattatcattcaacagatgtgtcagatggctgctgagggaatggaggaaacaagcaataagggagtgtgttaaaggaggaagaggaggaagaggaggagggggaggagaaggaggagggagaggtcgaggaagaggaggagggggaagaagaggaagaggagatgaggaagaagagggaaaggaggaggaagaaaaaggaggaggaggaagaagaggaagaggaggaagaagaagagaaagaggaggagaaagaagaagaggaagaggagaaggaagaagaagaggaagaggaggagaacgaagaggaaaaggaggaggaaggaggaagagtagcagcagcagcagcaataacagtagtagtcatctcgggcataccccagcagcctgcacacgcctacaattccattttgggggctgaaacaggaggatctcaaattcgtgggtggtctaagatgcacggtaagaccttgcctcagcaaacaaaataaagcaaggcaaagcagcaatgggaagctgggtagggaggcagtggctctcctcaggtcctaccagtgagtaggttccttggagcctgtgggtagtgagcgctctttcctagatgccggctgagccctctacagctaggcttgggtctgcctagcctcttccatgtgcacacaagggagctaagcttccatagccaaagctgtagacttccttgtggtctgtctgccagctgcacccttcctgcaattgcagctggaccgccagctgtgctttgcaggaggaagatgctggtctcaggtaccctggacagctccctaggcggtgtacatccttaggatgcatctgttctggggctggtcaggtggtggctctacttgggtaggagactccccagacctgccaggatcacaggtcacaaggagggccaggattccaggtgtccttttcttgacccagttattgtctggaatgagaatggtgatggagactggtgagatttgtgtttctagagtgccagtcacaacggttgtgtcttccaagtgggcccctgtggcctctctctttgtctggacatttgacctgcattgttggttgcaaactgctggctcccagcagtactttagtggaaaggcctgatgactacaaccttcttcagtgtccatgtgtgtaaaagcctaccccctgggaaggaaagggagggctgagcataggttttcatgctaaataaatgtcgttaaaatcatcttaaccgaagagatctttcaaaaaggcaatcctggtgttggctgaagtacaactaaaggattggacagattgactcactcttggtttccataaatacacctttgtgtagtgagggataacccaagaagactgagttctgattctcccaacaactcctcccatgttgtgggcaaatcctatctttctgtgtgcgttagtctttccctctgagcaatgggtatacatctcgaggcctagacactgatagcttgccttcgatatctaggttattacagaatggtgaacttgtgctgtgtttcctgagtttaacaaacctgattttgccaggcatagtggcgcatgcctttaaccctagcacccaggaggcagaggtaggcagatctctgtgtgaagttagcctggtctacaaagcatactccaggacagccaaagctacatgaattggagactctaagtggccacatcacacttaccatcatttcactatggagtcagtctgcacaaaaaccaaatgttgttctgtctcaaaagcaaaacaacagtaaaaaaattcaaaagtaaaataaataggagagagagagagagagagagagagagagagagagagagagagagaaagaaagaaagaaaggaaagaaaatgacacccgattttgaggaaagagttttacagtctcagagatggtcaggacttgtcaaggctgaactcagctagaaacaaaggttgggtgagcatggcccccagccctgctctctgggagctgctgccaatcctaacatcatgcagcagagataagaccacaatcctcctgcctagagatgggtctgctttggtctcttgtggtctctggacttctctagaagtaagagttgtgcagaattgccctaatggccagggatggagtgtgcaggaccttctagtttgggcttctagtgtggcgtgttctgtagatcagattcacaggccccagcttctctggattacccggggatggcaaatgactccgtagcaccccggggtttgaagacaaggggtgctcagctcaggaggggaggtttctccaggctacacattttcaggggctccaacttgagatgtgacctgcaggtctcaaactatagtgactccatcatccaggattgaaccgtgtgcctgtgttcacacttccttactgtcttcccaccatggagtcagtccccacaggaggagctacattgttaaatcctgaagctgatgagactttagttcccacttccctacaacttttcagctagggaatgctgcaacttcgcagggctgaaaaactggagaggcggggattttggatcagctggataggcacttcccccctcctaccgcagggtcctgtggtggtacctttcttgaaaaggtaagttgtgtagggccgcacttagtcctgcagcccagcctccctcccacccacgggagggaggctttttctctcttccgcgctcaccatgtcccctcatcatagaacagtgctctttgatgtcgcatagccccattacccctctggtcagctgagacactgcctaacaacagcttccaggacccttctggcctctctgcacagactcctcgccaaccctttaaaagctgaatttgccagtgacaactcagtggctggcagcttcacacacacacaaatgcacgttccccacacagttctttcttctcttcctgttttggctcactagcagcaccaaatgcctgcaagcttctcctccctaagtagcctttggaaactatcttcttctttcagaatccatagctgcctttctcccttaggctgggccagagcccaggcccaaagctcctcaactgtcctctccacattttttaatgacctgtatggccgtctacctttcctacggtgctgggagctctaggcaaagctgagcctatcttggttctttgaacccagtgctcatcctggcgcccagttctgccagactcagctggacccggtttccgaaggaatcagaatcctggagggctcaactgtttccctgaaatcttaggtgtgttaagtggagcctcgtccaactaggacctgggtgagagaattgagaccggattgcgacctcgcccccccccccccatctctcagcagcttcacgggggtggtcagccagagtcagggaacccggaggcggcgggagccccgctctgcttccgcggctgggagcgagctttcctcccgggctcgctctagaaggcttcgtacaggtcgctgtctgagagcgccggccgcttggaaggctcctcacgtccaggcgccgcggtcacggctgcgccggtttccggccatgaattgggcttcagagtctgagcctcctgcccgactccgggctcagtgcaccgccccgggggcgggggatggacgcccgccgaaatctacccggacagccagggttcgagcccgccgcccgcccgctaagcatcccgatgcctcctggctcggtgccccggtctgtagtctctttgcaggctgcatgagtcgggggtcgggttccgagaccccctgatccgttctggtcagggacaggactgcaaaatctcggctgaagtcccccagcgccagcgagttccgagttccccctccccgagggtagtcgatggctgtgcctactccgtttctccagcgaacccagaggccgggcccacacggccaagcctaggctcgccgcagacagaccaagtccccaccgtggtgccgtcctcgtagcatcccccggccgggagcgcggagcaccgggcgccccctccgagcgggcgagcggcgcgcggctaggctaaggctccgcagtcacgtggtggagaggagggcggaggggagggaggcgggcgggagggnnnnnnnnnnnnnnnnnnnnnnnnnnnnnnnnnnnnnnnnnnnnnnnnnnnnnnnnnnnnnnnnnnnnnnnnnnnnnnnnnnnnnnnnnnnnnnnnnnnnnnnnnnnnnnnnnnnnnnnnnnnnnnnnnnnnnnnnnnnnnnnnnnnnnnnnnnnnnnnnnnnnnnnnnnnnnnnnnnnnnnnnnnnnnnnnnnnnnnnnnnnnnnnnnnnnnnnnnnnggctgcgagcgccgccgcaaccgcaaccagagccggcgcgggagcccgagagcgctgggctgggctgggctgggttggggcgggcgcagggcgcagggtcgggagcgcgggggaagacgcacgggcgggctcggctctcccggggagcggcccgggactgcaccgggaccggcgcctccccgctccgcgctgccctcggcctcgccccgggcccgggcggatgagccgcgcgccggggggacatggaagcgttgacgctgtggcttcttccctggatatgccagtgcgttacggtgcgggccgactccatcatccacatcggtgagctgggagagcagacggaccgaggctgggcgggggccacctaatagagccgatgatgcgcggagtccaaacttagcggctccccgggccgaggggctcggcagtcggtgttcccccgaaggcccgcgccgccccgcggaggagctgtgctctggccgctcggcgctcctgcgggcacctcgctactccccggggctcctgtcagtgcgcggggccccgcggcctctgccgacacttagggccgcggctgcggggaacctgggatagacccttgtcgagatgcgtgcccctggcggggctgtccgcgggctggacccctcgtcacagcttgaacattggggccagggtcggatagggctcggggctagctaagttggcagggcaagatcaaagaggccaaagcggaaccatgtgtgtctgtggatgggtgctgtcagcgtgccagtgtgtatgcacctggcacggggttggtgtcactgtgagagggcgttggggtgtgtggggccatctgagcttctcagtgcgactgtcgcgttctgtcagcctgttagagtggacacagtgcttgcccgtttctcggtgtgtgtctgtgtagctctcggtgtgtgtgtgtgtgtgtgtgtgtgtgtatctggttgtggcaactgcagcccaatcctggacagtcctagagtttctgcctgatataagtcttggggccagcgtacagtgtggatggtaggggtgaacggaaggagcatggatagtggggtggggggcgctggatggagaggaagaagaggaaaagcagaggaaggggagaccggaggaggggtagtgatcaggagtttggagcagaatggctgggatctcgagaagttgggcccggttgggggactaacagcggtcgcttatgggggagcccctctgcagtcgcctttccggaagttgggaaagaccagctaacacggataaactgggggttgggaggtgtgaggaaacgtggctgatgttacccgcggagcagaaggtggaggggatgacagggacagagtctctactccaagggctgcggcctcccctctggtgccggtgccgggccaagatccaaacgtgcttcccgcccaggagccagagtgggtctcgcggtcagcattgcggctccagtatagtgaggaattcgggagccgagtccttttcctacccagctctcggctccagggcaattagaaggccaagcaataggaccttggcaatgaccctcggcgcctggtaaaggggctgtggggggtcagtgaggaccccagagcagcagtccaactgatctccgctataggggcagggtcagggaagctgtgtgcctagtgaaagcgtcaggtctgccagagctccggatgagctgttcctgcttctagaagggccattcaagagtggtttcttctgggactctccagtcttgctagatcagaatgtctaggggtttaggatatagccccacccctttcatacatacaggaagaggaagtgagaaacgaagagcagaggcaccaggcctggtagcatcttgaccatacaagattctggttatcaatgccttctgcttaaagaaaaaaaagtctttggtgcaggagagccggccggccgtggaccaccttttcacttctgcatttgccagggaatgcaaaggaaaaaaaaaaagtcatcactccattctggaattgggataggggaaccttatcattttggagaatttactctggttcctgggatgggatttatgggaccacatcaggtgcatctgagcaggaggctacctcagtctcttactgtatgggtcatggctgggacatgaggtgctttgcttaagaagcacatgtgacctgatggtagcatgtgggctatgaatgtgtaacttatgtcaaccgtgcacgtgtatgatgtggcgaggggaacacaccccgtttgggttatgatgggagatgtttaaactacccaatcaacaatcagcacagagtcttgaggctagtgcctcatgcctgaaatctctctacttgtgaaggctgaggcataaagaatcaccatgaattgaaagcatctaggggcacagaaggagaacctgtctcaacaaagcattataaaccaaaccaaaccaaagtctagctcagtcctcccaccacgtggtacccagtggtctgaccctagggctaaatgaacatgggaagggttcctctccaggcttggtcttgacccctcttcttcctcaggtgccatcttcgaggagaacgcagccaaggacgacagggtgttccagttggctgtatcagacctgagcctcaatgatgacatcctgcagagtgagaagatcacctactccatcaaggtcatcgaggccaataatccgttccaggcggtgcaagaaggtgagtggtcactgagcccatgcatgagtcactaggctgcaggcagtgaggccgtgcagcaatgggtccaggcagggttgctacccaatccgttgtacagagcctcttgggcacttacttggctgctatgtcaggcatggtggcgtgtcctcccaggcctagcaaggtaggcggttcggtgcggtctgggcaagcagagagcctctacgcacctcaaacggctctcctggcaggactgtgtggcttctttccggccaggtggatgcgcgtgtgcgctctgcgccgctaccgagcaggcgtgtggctcagggaggtctttgtttctcgcgtgtttgtgggtgggtgtgtcttcgtgtcgggttcccgttgtcgtgtgcacttccccagaagcctcttgtgtcctgcagcccacgggagctcgtagctcagagctcttcctgtttgtcctgtctgtagcccagcctgtcgagcgctcagttgcacactctgtgggtcctagaagcttctgcccctcgggtcctcagcttctctgcctctctccactgtgtttggagcagtccgtctttgcttgtgcttgctcggtggacctaggagacgttgccgcctggaccggaggtgggcgctgttcgctcaggaaaagagcctagctggactaggtctgatggcagaaaaatactagctgcccagggcaacagcccccccccccccccgcagctagctcgcttaggattcgcggaggcaggggcaacaggtgggcagccagtgaggccaccagtctttgctggcaccctctggcacctgcactcgcgtagtgcacttacatgtgtgcaggcaaaacacatctatacattaagtaatgggagctactactgcttttagcatccgcagatgtccgttgtctgatgtcttctgatacattagtgacagcagctccctctgtctttccttcccgtgcattccctccacgcctactcggctggaggctcttgaagtgtcccctctctcttgttgttgatttctggtcaaggccctggcaggaacctgctcaactatattctctttcccgctctcctttgtcttgtttacaacaaacaaggctccgttgtggtgctagtgcttccgagtgcctccgatacaggggtacagtagaaagcatagcatgtagggacttcttcccagaactggcggggctacagggcagggagctcagctgtcagtttctccctgggcttgctgggcctagggtctgcctgttgctttgggttatatactgtctaccagtctgccggtaaccttcaagatgggtgagccatggatggatggatggatgtagtctacagtgctgggatcttcacacagcatggggggaggactttgagggccttctggttttaactacagcaaaagatgagaagggggcagctcttggggaggggctgctggctgtaaggctcaaagggtggaggatgttttaaacgcccaaatcttcagtctcaagagctgaatggaggtggtggtgggtagggagagactggtgttgttttattctgagatctgtggggccggtgaggtggctcaattaataacacttcccactcttgaagaggaccctggtttgattactaccacccatatggtatctcaccactgcctgtgacttcaggtctaaagtacaccctcttctggcctctgctggtacctgcgcaaatgtgatgcacttatgtgttcaggcaaaatactcaatacatacataaaagactgtgaagtgctgcttctggctctggcagaggtctgttgtcttatgtcctctgaagtagagtcatgggggagtgcctgtccttcttatgtggccccatcccacaatctgtctccagatgccctctgaccgcagacatttttgtgggtgtgttctcatcatgactccttgggacctctgtctgtggcctctatcagattagcacacctcgacaatggttgcaggttctggtgactttcttcatggtgtagggcatagctatctctaccagaaggaccccggggactgaaggtgacaatcttacacagtttttttttttatttgtttgttttttcaagacagtgtttttctgtgtagccctggatgtcctggaactcactctgtagaccagggtggcctcgaactcagaaatccacctgcctctgcctccccagtgctgggattaaaggcgtgagccaccacacccagcccttacacagggttttaaccggaggcagggtgcatacatggatgaactgtgcagctgggtccctggagaggtcatctctgttgatgaaacagctgtcacacagcttcagcagatttgtgccttggtggcgggaaaagtcctagtattgtagatgtgccttttttttttttttaatgaaaaaaaaaaaaaaaaccaactttaagagacgcctcatggggctggagaagttaagagcactggctcctcttcccagagatcctgaattcaaatcccagcaaccacatggtggctcacaaccatctgtagtgggatccactgccctcttctggtgtgtttgaagatggggtactcatatacataaaacaaataaatctttaagaaagaaaacaatgcactgttgtgcgcttagtgtgctcacatagcaagtggctactctgggcatccagacaaagcttccttaaaagaagaaacaagaaacaagaaaaaggagactgtctaggtctgtacttcagttgcaaaatagaactttgggggggggggtgtgtttttgaggcagggatttgctcagtagcgcaggctcttcttttacttcatcctcctgagtgctagcattagaggctagccttcctccagcaccacacttggttctcatacctggtcttttacttgccaaccggtggaacaatctaaacaacagacaacacagagctatgtgccatttgaccttcaagccccaagtgcaattttttctaggcaagcaaggctctagtcagggccttttactggtttagacattgtttgtttgtttgtttgttttttaaatggtcactagtttctttttttgtgtaactggaaaaatgtctcagtctccaagaatggtaagaggacactctcagaagggtctgggagtgtttctgcacatctggaatgagcgggttagatactgaggattgggtcggcggtttctaggtaaagaaccccagccagggcctgctgctaatttggtgtgtagtggttaaagctggcatgcactttcaaccgtgggaatggcacaggctgaaatccaccttgttatccattccctgactctgcatagctcctggtgcctagaagggaagggaggagctatccctggaggccctgggagaagccgagcattgcttagcagcctcctccccctggccttgtgcctgtggagcaagtattcagctcactgggtctcctttcttggctgtgttctatggggtacttgtctgcccagtagctggctctagctggatgactatcccagctttttctcctgagcacggacacttattgcagaagacagtatttgggggatggggagtaagggcatgctgggagtcagtcttcaccttagagaagagaagtgctcagtgtgtccccagcaagggattgcggtgatattttgttgtaatttgagagacagcgttgtggtgacccagggctggaggcctgaatgctggagcccagagaaagctagcagagagcctgcctcgctcactgcatgacctgggggagccttgaccctgtgctgagctgctgcttctagatctgttaaaagggaataattgtagttgctgcctcttgggaccattggaaggattagatgagatgagacatgtataaattgcctgcataaggcccgaggttggtgttcagtaaacactaattcccttcctattccctgacccagctatgactttttcctcagcgtctcttagggctgttgatattttcagccacacagtttcttcagctactgaattccttgagggaggaccctaaatgaccttttcgttttttagcttttaccccaagcccccagctactaaaggaatgcatggctacaatgaacgtgtgttacttttaaaatgtaggagagaaagaggccagcacatgcttattacataaaacctggaaggtacagaaagcagcaagaagccaaacaaccccacccccgaattctactgaactagtttcttccagccttttttcttccattgtgttttataaatgaagagggctcccatcctgttccatgtgctattaactggctttttctgaagcatccatgaactaactgtaaacattacttctagtgcctgtatgtgtttcctggtatgcatggtcactcattcactcattcattcattcattcattcattcattcaagaaagtcatcatttatgctgagatatacatatttaagtatttatgaagaaaacaaggtcctctccttggatgttctggccctaatttttatacctatgatttacgcaggctggtcttacaaactctgtccaaatactgtcttttaggatagtatatagaatatgtattttctgagtgtctaagatgaataaacaacagcacaggaggacagttaaggctctaaaatgttgcatctttgattggtaaagtttgcattaacaagtacgaaaacttgtgttctacaagacaagtatgagaaaagatgctaatgtgttgaaaaagtcacactgtttttcagtgcctgctcaagcagaagattatgtaaatccataaaagaactggcttgaacgtgagtctcctttcacagaattatcctttattgtgagtaagagatgtgagccggtggatgtgctgtggatgtatctgtcacatcaaggcaggatacgggaaggaaagtacaatattctttagttatcagaagcgtgagagtactttaggaagccaggtaagaggggctggagatgtacccagttaggagaatgcttgtctgaacggctcagagccccccccccccccccccgtttaaccctcagaccgcacaaaccaagcgtagtgttgcatttctataatcagaacacttgggaggtaggagcaaggtcagaagttaaggcttatcctcagctaagaagtgactttgataccagcctgggctacataagactttgtttcaaaaaaggagaagcatgtttgggggagacaaagtaaagagcggggatggcacagagttcccacctactatgtgtggtagcaggagcccaatgcttaacaccacattcaaaaactaaaaaaggtaaaattacttaagtatagtttattgttggcagaatgaaagtaatatgatttaaaaaaaaatactggaagtgcataggcagccagttctgaaggtctgataaggttacccctagcgtcttcctggtgggcactctgaccctcacttgtcacttgccacatcctctctctctctctctctccctctccctctccactatgtcctcttcttattctactcagaattacaggttccactgaggccacatctggccctcaccccccgggcatcttcttcaagatgctggagacattgcttggcatctatgccatcaaaaagtcgtctctagggcccactgcctgatgtggactcaccaggctaaggcccgggtgctggcatggatgatcccttagggttaccctggcacagaaccgtgtcgctgccttttctgctttcccagcactgctttttccccagctctgggctccatgattcttctccaaaactcacagcagtgaaccaggttcttttcacatggtgtcatctgagcccacctctctcttctggggataatcaagagtgacatccttattttaaggttagctgatttgaaaacttaattctatcaatagcccatcttccgtgccacatcgccggcaaagtcccagccctggggactaggatctgaatgactttgtgggccactagtgtgcagcctctgtgtgcctgtgagggccagggcgtattgtagacctctacttcctttccatttcgttaggctgctgcattgcttgctgccttcttgctgtgtctctgggctgatcccaagttgctagagtagtttgggatgcatggctgggttttcattctgcagaggtgttctgcaggtatcacctatagaactggtgggttcctctacatacatactcccacagctccggcatggcaatcgactccctttctgcgcctggaggctgctttcacataaggaagtgcatggaagaaacttctctttgaccagcctcactgcaattgtgggctgctgctcagatcccagcctctttgtgtgtggaagaaggctcccctccctgtcccatcttcccctctgtctacctaaagccctcgatggtcagtcttgctttggtgcccagggcctaggaggagatgcttttcctggccttgcagtcgtgttgtctgtgatgcttcagctccaagggcgtgtgccaaggctgcaggtgcacagggctccttgctagagtctgactaggtacctggaactgtgtaaccctctctggattccccactggcgtttctccagctttcctcccaggctttagggttcttccccagtgatctctgggatcatttcagtgagtgtgcacgcacatatgggctagtgtaatgggaacacatgtgtctaaatgcatacatgtcagtccataccctctctctttttataggctgtgtggctgccccattcatctcatgctttggggttagactcagataagtttctgacccctgttctgccctccagattggcatgctaggcttacttgacagccagcctgagggtgtcttatgccaggtatgtagtaggaggacacagtctagcgaggccatccacgctgcgtctgaacatgtctgtgttcgcatgtgtgtggggcatcctccaactctcacaatggcaccagggccacttctccaggattttcttggaggccttcataactgtccccgagtgctctcagtcacatctcatagagcaggcagggcagagagactgttgcaagtcttgtagttgccaggtcaaggcccagaccttgttccttcaatgctgttgcctttcctttaaggtctgcatccggtgctttgggggcctggtgggacctgcaggacatgtggtcaagtgggagatctctggtgtgctctcaaaagagaaactgggtcctctcttccttctctctctttcacttccttcccggcaggaggtaggcagttagcttcaccgtgtgctcctatcaggatgccctgtcttgccctagccctgagggtaacagggccctctgctggtcccagtaaatccctactcctataaactgtttctgtcaggcgtttcatcacagttaacacagctggctaacccagtcctctagaaaacagtattgactcaaaagttgaagtgttggttctgcgccacttctaaaacactcctagtccgatttagtctaatgcatagatgtgagttcttttggatattctactagggccatgcctgtgagaggctggggtggtaggaggagacagggagatgctggtgtgaagagatgtaattacagctgaacaagaggagtaagaggtctgctgtacagggtggggactatggttaatggtggtccactgtgttcttgggaaaggataagggtagatattaagtgttctcattacggacattttttgggtaatacattgtgcaattagctctatttaaacacccttcaatgtatataagtgcaataactacagagttttatataacaataaaataaaacaaaaagtaaacctgctccaggcctggccaccattggggccaccagcagggacacacctgtgcccagacttcctacagcctcagccctctggcctgtctcttctttccatgttgtgatacagtattgacacaatcagtttgaggaggaaagggattttctggctcacaatttatggtccaccctggtggggaagtcacatggcatggcaggagcttgagggagcgggtcacatggcatgtgccatctgaagagagcagctaaggcatgcctgttactgctcagctagccctccagcacacagcacaagtcccacccacagctaaagaggagtttcccacatcaattaacacagtcagacccagaggcccctctcccaagccagtctagagtctgccaagttgacagctaacattaacctgctactggttggtgacagtcctttctctggggcgctgtccgctctgacagcttgtcagtgtcccattctctgaggtttcccctttccgtctctaaacagtttcccatttcataggctgcggacaggcccagcgttctccccgtcctgaagctcaggcttggggctaggagtgatcaatagacatctttctacctggttgtgggcagcggatgggggcaggttcccagtctgctgggcctcgggtcctcttccagctactggccctggctagttctgcctttccaggttgctgccttcacattgtcattgccagagcccagccaggcagctagcacctgcagatgcagcgccacctgccctgcacctgttcacagctgcgccctgcctgtcccttctactctacccaggaatagatgtagcccgggagatgacaggtgcctcacgtgctccttcaggtggactgaggcttctatccctgctcggctgtgactctagctgctcatctcagttgtccccactgtcagttgggtattgatgtagaggccatccataggatggtaagaaaattacctaggctaggggtcaggcactagcagctgctgggtagagaaaggatgagtgttgtagtggtccccaagagctgtaggcttactcccggctgctccctcctcatatctgtcggcggaggcttgtgtcttgaagttgaacttcagccttcctgggtgtcccaggagaatagtgaaggaggtcagcgccgacaacatgattagaggcagtgtggagccatctgtgcaggtctgggctctgggtattctgcctataattgcatagcattgtaaccttatggtagccatgtttgctcagagtgtagagtggctgctatgggcccggctggctcagccctgtaggagctggctataggccttgctttggttggtggacagaggtatgtttgggtccgaatcttcaatgttatgactggtatctgaagtgcaccctcccgggctcatgtgtggggcgtggttgtcagtggatggtcttttgggaagtgattgactctgaagtgctgtgattctcagcgtggatggagtcacacttggtatggtgttgtgggaggtgttgagaagcaggaggtgagacttaggcggaggagataggtcattgtgggtgtgccctggaaaggcataatttcttccaagactctctgcttcctgcataccttgacatgagccacttagctcttccacactgagcctgccagctctgacaaatacgtccgttagcaaaagatacataggcaggcagtacttaccttaccatgtatggccccaggagaaacagagccaagtgaccattgactgaaatctgtgaaataatgaattgaatcctcccctagctcgtttgccaagtgtttgtcacagcaataaaagtctgaaccatcaactcggaccagttggcttcctggtcttgtaaggatcacttttttcctctgggcctctcaccttcatgatctgggaagagggctctctctccctggcccatctcttgttctcagcatcctggggtggcagagggtgacccctgggatcttacttctgtcttttgtctagctggaaaaatgctaggtgctggtacctctctgagctctgagccctggacagggtttgtctcaatggtgtcttgtaagaagagacactagagtcaagagtctctctttctcttttgtaaggatacagtgagaggtgactatcgaccagccaggagaagggccctctcagaagccgttatgctgacaccttgatcttgggctttgagcctgtagagttgtgagggaacatttatgctgcttaaggcatacagtctgtggtgtcttgtgacagcagcgacagccctctctcctgtttcagggccttggagcccgaatctctcaaaaacaaaacaaaacaaacaaaaaaacccaaaacaaaaaccaacgaaaaccaaaccaaaacacacacacaagatgtttggtgcacagcggatgacctgtatccctcaggtgatgcacatttctgacccaagtttatgctgggcttgtctcctcactatagcctttcaacatctaaagaccattcctgtgatcctagcatgttttctagcccaggctctggagcctggctagtactacctgtgtttcttttgctaacggacgtatctgtcagtgtcccttttagcacacagtgctcctgatgtgccttgtcaagagactgaacttgctgagcctcagcttttggcctgtgaaatgggaacagtgctacctttgttaatagattgctttaagaaccaagtgaagaactagccacagaggtatagtatcatggaggaaagaccagccatggttattgccctcctgacactgtagaggaatgggtgatgcctgtttgtactctgctgaaattgatgaagcccgagtgattctttttgtggctaggaaggaagcccatccaggggatagcagggggaagagctggaagatgaatgccatctaggctctgaatctatccatgcctgaagatcagtctctttagctgcagtgacctaataagcatgcctctttgcctagcccatctgagggctcctgacacctgcaaaacaaggacgatgaagacagtgctgtggctgtggttgagtttctagctttcaggccttggggcctttccataaggaagggagatgcactggacaccccagatcgggtgtttacacttggttacttatctctaagtgtgaactgtacactgactattttagggcccaattagcagtttcagtcttggtcaactttactcttgcctgtcagagcattagtccttcccaaccttaagcctgtgcctgttggtttgctatgtgaccatgtttctaattgcatacacacatgggcctgtacatacatgtttgtgtgtttgtatgacctgattagcttacctaacgtgtgtagaagtgctaggaacctagtgattgagtatagaggtcgctgtccccagaaacacccttcccagggagcctaactgatggcatgctgccggggacccatcaggattgtggagagggtaactaggccatggcatcctaggctgggtggagtgagtgggcttttcatggcccatgaggaagttccatgcgtgtgttctctagagcaacaaggccctcccatacttctccctttaatgcgtgaaatctgacacgggtctgaaagcactctcttcatcgtccttgttttgcaggtgtcaggagtcctcctcagacgggctaggcaaagaggcatgcttattaggacactgcagctgaagagactgatcttcaggcatggatagattcagagcctagatggcattcatcttccagctcttccccctgctatcccctggatgggcttccttcctagacaccatcctggccactgtaggttgatatctactcagctcagccctggtctctcctcatggcaggaaggggattatgggggattatttatcataagcctcctcagggacttacgattgctgtttgtacggcaagggactagtcagttcctcccgaatcagttcgagtgctggagatgtgtaatcgcttcttcttggccaggcttgtgcaccaccactccatttcctgggctgagcataagagggattcagcagaactgggtggggcacccaaggaaaagaggtgctggtgggcccatggagaaacagtgttgtcttacctgagggatgtcaagttaaagggaacagatgtggagccatggcatgtgcctgtattgcacgaacagctggatgttcctgctcagcgggccccaggggacccaggtatgctgctctgaaacctcttctgggtcaggagggctgccagttctggaaacacagacctggaggacagaggtgggcagataaagatggtctttggagcagagacatcgtgctagcttgtgggacaggaggcattgtgaggggggcatttagggtacagtcagctgagcagttgggttggagtagagatagggaggaaaccttagggctaggcaggctaagggcacctcagagcctcaatcctgaagagccctgaatggtgggctcacctaccctctggaccccagttctaacagcagatgagctgaatgctcactgccctcagggctactactataagaactcccttctgctgggaccggccttgtgtcatgaagcccattttcaggccagggcactgggtctgggtatcatatccttgtcccttgcttcatatcgcacctgcaaccattgcctttggccctgatctcagcctcctcacctgagcgactcttttctctgttctcaacccctgaatggcccatcctggtaacttcctgcagattctaaggtataaagagaagctcaaagagactaggccttgccctgggcctgtgtgtcctatcgatgaggatactgcctatcctggggacactttccagggctgctgaggaccctgagaagtggactattgcagaacccaaaaggcagagggtgacttcgtcacctaattaaacagttcaggtcagcacagaaagtaggtggccacggactggaaagaagtggggtctcctctggcaagtaagagggccgagggcagcctccagtctgcagatcctgttctcagacacatggcatgttcagtggtgaccagagccaggtcctcctagctgtctactctgtgagctgcaaccacagagcagaatgtggtgtaggcagcaaagccagccaagagagtggcatgtcatgagagaaggaggccagcaggccaggaaccccagctactcaggaggctgaggtgtgaggactgccaagttcgatgtcagctgggcaacttagtgagactctgtttcaaaaagtaacgaggactggagacttggctcggtagtagaatgcttagcatgtctggcgccctgagttagatctccagtactgggtgggtcccaggatttctgcaggacccatgcctaccctagtggctatctcccacttcccatgcctacagcttccttgtcccccatagggaggggagaggagcagacttccaggctgttctgagaatgctgcctggccaccctgctttgagaactggattagagctacacaattacccaagtccaggtagtaggtgaggtagctccaatcccgtctctatttaccttaggatcaccctcctgctctgttctactgggctgcactcaaagtctcatactatgcattgtgtggagatagtattagcttctgacaagggaatctgcattgtgtacgacatcacagcctggggctttccttcactcagactagagccagagataacagctcagatgtaccaacggcagtctgtggcacatggtctgtggaaaaggtagtgtgatctggcatgagagaaagtcatagacaactgggtcctttgccaaaggggcccttcagggagccatgcatggtgccacttggattatccattagggcaaagaaagaggaggtactctctaactcatgtggggcttgagatcccctcctcagtagtgtgactggtgcccttggtgaacagaggtgaggtattgcctgacctacctatatgcagctcagtactatggcggcagatcagagtggaccagatggatctctgtgggccacagaagttacaggacctgaaatctgccaggcttatgaggaagatctgatggagaacttcaataatcaggacagaggcttctagggatgtggagatcgtgtcctgcaagtgtaggactggatctaaaagaggctaatttaggaaggccttctgcttcattctcccttggcatcagatggtactgctggcacttgctcatacgtgatccttccatagacgtagtttggtgtgagctcacgggggtctggggaaaggtggagtggtatgagactcatgggtggcctttgacaccaggcagaatccttcctctgcctcttgtggctgtgtgattcgttgcatgtccccttacgttttgagcctcagtctaaatgtctgtgacgtggaatttccatgtctactttgaagattggttttgagagggagggaatatctaccgcatgcacatagtatatgtccattcattccctagctacatgtctctgaggggttgggcctgtaccagatactgtgccaagtatgtgtgggctctgcaggctcatgcctcagcttcaggcaatcagacaagggtcaggatccaggcttcacctggagaacctgatggaaaaggtctggacggtccagctcttgtgtgatagcttcctggctgttgcttctagccagtcagtagctgcttttcatgctggagcggcaggatgctgagggtagggctggtcacatggcatctttccctggctccctatagttgtgtggctaatgaggttgtcactgttctcctctgtcacagctgcacatgtgccccatttcagactgaaatgcacatttctgctctacatgttaggatccctgtccctgtctgggccatcagctgtcatttggtcttgccagttttccctcagcaggcacagggctcggtggctcagtagaggatgtgggagccaggatcaggagccagaagctccaagactgggattttcagagggtacgctcacattagggtcacgtggactttaacttaaggacctgggccaccaggcacacctagcagatctctataaagacctatttcaaggatggtcttttatcttgtcagcaacatggaacagtggtaaaaagaatattctaattcatgagcttatagaaacctaaaaaccttgcaagatattggttttcttttccttagtgagatgatggcaggcagtaaagcccactgtctctttgtaatcggatttaaattgttttaattatacagcccatattctcctagtaacatagcatctctgtgagttaatgggctttgaaatcttcctttgttctatatactgtagatacagattttttgttagatgatttattttttatatagaaatccaaaagatgagccacagtttaagctgagtattgggaggttcacttacgttcaaagaaggcagaaatgtctagagaaactccagcttgaggacctgggctttgctaagctgagatctgccaggtcctcttcagagcctgctttggagtgccttggtgatgtctggtgcgtccatgtagctaaggccacatgtggtgtcctttgttgatcctgcagtgataacactagaggggagttcaggggctggggagttggctaagcactgctgcacacgcataaggaccagaatttggctcctcagaatccatggaatgccagtgggcataacagctgcctgtaattccagcctcaggttgcagagacaggtgtacccagagcaagctggctcgcaagactagctatgtaggtgagcactcggtttgaatgagaagtcttgccttggtgcataaggtagagaagtgactgagggagattcttgacatcaacctccggcctctacatgcatgtgtacccatgtgcacaggtacccacacacaagcccacacacatgtgtgcacatctgcatacaccacacatgtacgcacaccactcccacacacatgaaaatgggggaaagaggacaaggatgtatagctggatggtagcaggaggcagtggcagggttgttgcaagctgaagccaacctgatccacatagaaagttccaggtccgtaacatagtaagaccctgtctcaaaataccaaaacaaacagcaacaaaacccccaaatccaaacccaaccagaaccaaccaaaaccaactaactaccagcagcagcagcagcagaagtagcagcagcaaaaacaagaaaagtaatttgcccgtccatccatccatccatccatccatccattttctgagttcccacagtggcctttgccctgaacctggatacttctgggaaggccatagactttattcttaaaggactcacactttatactttgtagagaaacaaacacatgtatgactcaaagataagacttctcagttgtcagtgctgacaggacaggctgctaggctccactgccagtgtccgctagtaaaatgcagtgagtgcgtcaccatccccgccaggatgccactgggaaggggagctgcatgcactccacaaggcttcctgggggttgggcttggcctctctcaggtctgccctcccctctgtcctcagaggctggcctacccaggctgaggatcagacccgcaccctgactcttcctgcctactgcaccatagaccatcccgagggttgcaggctattcctctaggtggggctgttctagtgaggtcaactgaatcaatagaaaaagctccttgtgtcttagtggctgtcaggcaaggactctgagtgtgtgtgtgtgtgtgtgtgtgtgtgtgtgtgtgtgtgtgtgtgtgtttatatggtgttgatgagcgggtatcaacctccattttaacttgtttctttccttggcttttctggatttgggctgacatgctgatgaccaatgttagtgatctctggtcttggagagttgcttatccagtctggtttcttatgctgactgcagcattgtagaagacctgcacgcagcttagaagaatatgctgtccaatgtgggggctgatcagtctcccccttctccagcactcacttcttgtacctctttttggcttagagcccttattggctaaggcttcttaccagcgctatggggaaaagaacagaatttctcagggtctcagaaataggcaggagcggacaagattgagatcatattgatccctatgacaaagccttctctcattccttgatagagccagagttagtattctaaagttgggccgtggtgtgggctccttggccaagcctccttgtagctgatcttgggacctagtcctctatatagaggctccttgaaaagaaggacgtggctcagagatgtgtaggcccccagctcaaagttaaggtgcctgcatgggaaggtggggatgggaatgggggctgggcccgccaccacctgacacccactgccgggcaacatctccacagttgctgagcctgccatgagagaccacagattgcaaaatgtgagtgcggtttcaccacacatggtttcctaccatgtgtctgtctggcatttccagctggtgaggaagaagccttggaaggagctgagaggggctgatgctcaggctgtggggtggacatgtgttggaaccacaatggctagcactgccttgtttgtggagggcaccgtggacatggggtaggtcttctctgtcagagatcttgtttagtggacagcaggaggcctgggcacccattagcatgtctgtggcagttggctccagtgctggcagaaggatttcctgttgccagagtcctcctcttgtgtgtaaggggattatgttgggaggatgaacctaggcattcagggacattccctagggcagggactgaggcttagaggacaagcagggctttgccaggggcaaggtaggacagcaatatgggtagggaaatggcatgtgcaaaggccaggaagtgtgtgtccctcagaaaataaggcagaagtgtgtgtgggcacatgcatgtgtgtgtgtttatgtgtgtacatgtgcgtgtgtatgtgtgcacatatgtgtatatgtgtgtgtgcatgtatgtgtgcgcgtgtgtgtgtgcatgtgtgtgagtgtatgtgtgcacatgtgtgtatatgtgtgtgcatgtgcatgtgtctgagtgtatgtgtgcacatgtgtgtatatgtgtgtgcatgtatgcgtgtgcatgtgtgtgtgtgtatgtgtgcacacatgtgtatatgtgtgtgtgcatgtatgtgtgcgtgtgtatttgtgttcactggggcttgctgagcctgaggcctgtctgttcttcatgagtcaggattggaatgatgaccctggaattgtctgctgaggctggacaggaaaaacagaatcaatcggccggaggcgacctctggttctaggttaggaggatggagttgcgtggctccctgggaggcagagtgttgattcctgttcttcctcggccacttctggtcttccctccagggttgtccctgctagacagatgccttaagttttcactccagtttctatgcctagaagccttcagacagggggctagctccttccctcttccccaccatttggcccataggtgcatcccagggacagggtgaatgctggtgtttgcctgcattctttcaggacacactaggctcccactcttgtgacaggtcctcagtatgtgtatcaacaggggtttctcctgcttctctccttacgtccatccctccagcctttagaagatgtcattaccctcttttggggcttcctggtttggtcggatcagtgttgtgtggtttctgcatatcttgcttccattctcactcatcctaaagtttaggttttgtcctgttcttcacaggcctcacctagagtccccgagaggctccctgagtgtcccttctgtctgtgtggctcactctcctcttgctctgggcacatttcctttgccttccttagcctccattttgagttttaccttacttcctgccaccccatcaacatcactgtccttgtactgcttggatgcttgtacccattctcacgatgctttaggaggccagagattgtctttgtctttgggggtcttttttctccagcactgcactaggaagacggcaggagctcaaccaatgtgggtgtcgtgggggactgagtatctgtgctgattgtcacacccaggccgaagatgttgtcctgtaaccctttggaaggcccctggtgcatcttgggtaatcctacctgagttcacattttcctgaggtcaccttcttcccagcgttgccacctggtctctggcgcagtgctgtctgcctccactcgttctcttccattcttgtgggttcctcagcaggcatagctggcctccatactgcccactagggctctcaaggcagccatcctgcctagcaggagccaaaagctctgcctttcttccctggtgtgcaccctataagtagttctgtgcgggctagtagtcatcagtggcaggagcgaagcctgcccctgggagccgcaagttaattagcgtgtctgaagccgtgcagtaatcactgaatctggtccccaagggcaggcacgggtctacctcacccctccccagtgagcctctgatcttttctggtcttgtctctgccagtctcatggcttcctctaactcactgctgcttctttctggcctttacctcaccaggcttttctagagacttctctggaattcaagacccccagaggcgcctaggggagggttggcagaggtattggttcacttctgaaatactcagcggtgatgagtctgggccaggcacacggtagggtgagggtgtgcagggtatggcaggtccatcaaacttgttttcttgtctcctagagttaggaggtaagaggctactctttgaagcaactgagctctggtattgctacatattagcttttttttggggggggggtggggggagaggggcaagacaaggtttctctgtgtagccttagttgttctcaaactcattctgtagaccaggctggccttgaactctgtctgcctctgcctcccaagtgctgggattaaaggtgtataccaccactacactgctgattaaaaaacaaaacaaaacattgatttgtttattttatttgtgtgtgtgctttctttgttttatgttttttgcatttttttccttgcctgcgtctatgtgtatgtaccacatacattcttattgctaactttggaggtcaaaagaagaatctggggttacaggtggttgtgaaccaccacatgggtgctgggaactggatctggtcctctacaagagcaacagtgctcttcaccactgagccacctgtccagcccacaggtgtcagctttgaccttgaattatctcaggtatcactttcctcattactgagatggagagaactcatagccagactacttatgggagcttcgtggatgcaggatctgctacgccaggaggtgcttcctctggatgcagcagatccatcagcatgtgacagtcattcatcagacactggagcatgccgtggtggctcatacccggccccagagtttcaggcactgatggtagagaagaggggcaggaaggctacactggacaaaaaggtaaaggaattagctgtgcgatccttcccaccagggtaccctttatgcctacttggagggtgaggcaggtctgggcaaggagaacaaggaaacaccctgtggggcttgagatgaacatagtcatgacgctgccctgttaccagtgggatatgcctgggccacagcttattagagaacactagccatggctctttacgtatgtgggacaagaggattcaggaaagatcccaggtctggcactagagtttttttgtttgttttgtttttcgagacagggtttctctgtatatccttggctgtcctggaactcactctgtagaccaggctgacctcgaactcagaaatccacctgcctctgcttcccaagtgctgggattaaaggcgtgcgccaccactgcctggctagagtatttttttaaggctctgcgtgacttcaatttcttccagattcccttcatggaccattccttttgcttagcaaaaataaccaaggaaagagaacatgttctgtagccactccaagggactagtccctggaagactgtgattggctcaacgtgggtcatgtgcctatttatgcaccaattagcactaccaaggctcgggtatcctggttggtcggtccatctgggaccatgttcctattcaggatgggggtggggcttttcactgagctcccccaggctgtgtgcctctgtttcagttggaactggaagacaatctcccagagggaggagaaaggatgttagcagatgatgtgaagagcagatggccttcagggctgcgctggccaccccacacctgtctcagcctccttgtgctgtgtccaggactctctggggttctcctacgttgtctttttgtttttaatttcaggatattttttgccaccttttcagctcagagttttaaatttggggttctgtggtagtcagttggcccagggtatttggcagctgcctacttttacaggacaatgtcccaggagatgtctagctaagtgtcctgctggcacactgggtctggctctgtagggtgagggagtgtatccacacctgcaggcagctgttatcctgtaccgttgatgctcagcttggagagactcctgttctctctgtgcgggcatctgctgtggaggacagattgtaattcaggggctggcttgaggtggcttagcttgttagtagatcagttggtcagctagagagtgggccaggcagtcagcagggttgtgtgtcaggatctttctagagatgtgtatggatgagtgggtgatgctctcatgaaataacatgactgtcagaaacaatttatagtcatgttcccatggagcctggcctgcttatgactgcggatgcctcctggcaaatgagctttgtcacctaattattgtgctttagtatgagttagggaagccagccctggagccagcttggtggggtactgcagggttcaaggtacctaggagacctgagggcacagggaggtttgaggttggtttattaccccatatttggtttcttcttcagccatgtagactgcagcattctgtactcactgtatgttctcactgtagggacacccatgttcccagaccctgaatgtcaccattgtgttactctgtcaacaacctcttggcattgcctaaaaatgtggttggcctggggccaagaccaagggttctagtggaggtgaaattttgacctatgcccgacatcacgtgggaccttgcgcgtgtgtagccgtgtgcactgaatctcctattgtaagaatggtgaaaatgggatgttgagatggtgatggctgcactcgccgcctccggatgcaagtctgaagacctgagttcgattcctggatcccacatcaaggtagagggagagaaccaactctacaacgtttttttgtttttgtttttgcttcaacctttgtttccatatttcttccacctccatatgtgtgttatggcatatgacctgactccagtacactaacagtaaattaaaaaaaaaaaaaagaaaagaacagcaaagacacttccttatctacagtgctggactaagtctatcgaccaaatccctaggaggacagcctggactgtctatggtgaacatgtttgtaaaggtaggacagttgctgcaagcctcctgccttcacctttggtcaccagcacgtgcaatggtgtggggccccaagtgtcctcaattcttggatggagatattccagaaaactacccttcctggtgagaggcccctcaagtgcttgttctgagctaggcccagctaaggagtccatgtgccttcacactccctgaggatagtagtggaatgcagagggaccctctcatcacctttatgcctggggtagagtggtggggggaagcatgaggcatcttgggtctgagccccatggtgcaaccccagctcttcagcctggccatttgcttgatgtctcttcatgagctttcaaccactagccatggtgtctgctgagtggcaactgctctcagggcacaagagtgtgtgggaggactgccttggcacctgttgcatcttctctaagtagggtaccaatcgccactgctagggatgctgaggaaggacttaaatgaggcgacaacatgtcccagattgtgctcagcacaactgctttgtcactgtgttggagatggctctgtggcaggttatctatgacccagctggagattcttggagacatcaccataaacatcagtatttatgtatgagaaggccggcagtagagaagctccttggtgtctgtgcactcagatgtggaattttctgcagcccgagagcctctgcagcatgtgtaacattctctgcagagggtctgtacctggaggcactcttcagtaaccctgcctttccccctggtttggcatcctgaaggagacaggggaataagatggtcctggcaggtggcacatcagcccaatggagctgaccgtggctgacacacaggcttaatggttacagcagcagaagtcagagcttaattttaagaggcaaggagagattgctttcatgttctgccaaaatggggtttcataaacactgcagcagtctgtgtgggatgctgtgtgtcttgtggttgggtagatctgggagcaaaaggttctgcctaagccctgcctctgttccctgattgatctgccaatacagaggatgtcagcgatttagcaaatctgttctaggaaatgtggccctgcagccacaagagcagtgagagacaaccctgactagctcagcaggttcacccacatccctaccctctctctttgggtcagtgagcctctgttccctcctctgaaacataggaggcatcatgttctgaattgtgtagccttgaagtaaggactatatctttatcccctgtgtccctgggttttgaaggatatctaggagttctcacatagctagcaggagaagggcgatttagaaagataatactctgtggaagccttaaaatatctgactgtggtaggagctataacgaggcagagtacattagtcacagtaaagcaaatgataggaacccctttaagtccttttggtcagggctctgtgcatcaaggagatgctggaaaggatggatggtgcataaaatacatgggcagtctctgccccccactgttgggattttgggatttggttcacttcgtcctgacagccagcagcaacggtaaatgagggagatggaacgtgttattttaattatatgctctccccacctaattataattttaattgacatgtgagcaggcactgtgctcttcagagctgtgtgaggtaatggcagacattctccctggaaaggggcacaggttgctctcttcattatttgggcagatggatagggctgtaagggatctgggaggggcccagcatggaggaaggattccccttgagccatgccgagatgaagggtctttcctgcataggaggagcacaggaggatcatgaaaggcagggatggggaagaaggaggtggcaagcctgtatctggctctgggatgggtttattcagatctccataaacttgtgctttcaacagacatttctatagcacagtgcagggattccagactgtctccagctgccttccttctcttgaaaggctcaaagtctagagggaggctagtagatgtggaaacaaataattctgattccttgactatatgtgaaattagaagtaagtagctttggtaatggaaagaaatgtttcctagtgaagtcaggtttcctagaggacatgaacaggagttgcctagactcttgaagatgtcaaatggaaggtagaggtggcagtttaaagcagtgttaggaacttctgcaggggtgtgcagggacagccttagaattttccagagggaagatctgtcagactaggttgtagatcttggaggttaagtctcccaaggggaggagccaggcccctaccctgatggcaaggaggggtatttggagtggggttgagatggtggggataggagagtgggtgtgtgtggaggcgagcgagtaaatgtggggttctaaggtgaggtcatgtttctgggtgatcaccctaatggtaggtgagctacccagacccatgggatggatgggggtggggagtgggatgggctatgttacaatggggtagcggcatgaggctaacctttgacatcaatcgggtgagaccagtgagggttaggtggccagggctaataccagggagggctatcccgtagatagggagtcagggaagattagggagacatggatcaagttggaccatggggtagactatcacaggggaggagaggcagggctgcttgttctctagccatatgtactgtggattcctggctgattagtggcccatggccatttgcaaccatgaaatcatgttcacttttctttattttttattaaagatttatttattattatacataagtacactgtattattatacataagtacactatagctgtcttcagatgtaccagaagggggcgtcagatctcaccatgggtggtcgtgagctgggtcatggttgctgggatttgaactcaggacctttggaagagcagtcagtgttcttacccgctgaactgtctccccagcccctcatgttcacttttctaataggaggagggggcaggaaggtccctgaaatcttggcatgattgaggtacttagaacatatcaagaatacaattggggccttggtagctaagaggaatctgaggtgggcagcaggcacattggtgactggtagggtagacagagtgggtgagcccttgtcatattgtcatttcacattagatgtgttaggagggatggtgggtttctcctcagctgagagaagagcactgttaggagctgactccacattcttcctccctgcctcttcaattttctggttttgtctatgcatagtgctaggaattggggggcgggcactcacacacactcacacttacagctgtggataagatgtcccccggccaatcttaaatagtaggtccttctcttgacacatggagaggaagagccagagggaggaatgactggtagcagagaggaacgtaagagagctaatgtctcatgctgacaggaactgttgagtgtcatgtcatagttggcatgtgagcatgtcatagtttgggttgggaatcttgagaagtgcaaagaattctgggtcccctcttgacctccaacccaacccccagaatgtggaaagaatccagggagtctttcccagtgtgacctgggcattgatcatctacacaaaaacagggctgggtttgcctgaagttaatgtggtgcataggcatttctggagatgtggggatacttgcaaaggatcagcagggccttccaggacctggagggcagggcacctgctaagcagacaatgcctgcatctccagcacatactgatatctcactaagtttttgtctcctaccttcaacctttaacactcttatttcttgaaatgtcacaaataatccaccaattcacatctaagatttaaaaagacttaggaaataattagagggaataaacgttccatttccttcctctgaaggaattacgtgatcaggtttattcttttagaacattccctgtgtatttctatttgtcggcacacagaatggaatagttttcctttgcggtttcgtgtttccaggggatgagttgtgtggaccacagcatctcgctgatttcctgagctcctgctctgtgctgtccttttaacccttacgtaccactgtaaacagaatcttaccacatgtctccccgatgacagacacttaacagactctcttaatagatatttagattctctctggttgttcaccgttacagaccatagtgtgatgaaactctcaggcttacccgggagtctttatctaggtagattccaggaggggaactgcttggcaagtggcatgcgcattgaggtttttaaatagcttctgccaacttgccctccagaaatctgaatcaatttgcactcccacccaccagtgtaagaggagcacccagtttgtcacgttcttgccaacacttgatattatcagccttttaattttttgtcaatctgatggctgataggcggtagatacttcattgttattttaatgtgcaattctccaattactatcatttttcccctacctacacaacgtatgtcatcttcgcagatcttaattgttaataagaagtattattgcgtttgattcatttatgcaaatagttcaccacaaacaggttagccagggtactctcctattacccagtggtgaagctttgaacagagcagtgtgtgagctgcctgtggcttgctgatggccagtgagtgccaccctccccctgggctgccgccctcctgagccttcagtctgtttcttggttgtttgtgtgaattccttaagatgatgtggtccaaggatgggggaacagcagttcactgcagtctcctactttatggtacttagagcaaagattacaggtgatacagagaagctaacttggattttaggctgccttgcctctatttcactaaaagtaacactaagtagcaccaagctgcagcatatgtgtggatttttatttatttttttgtcaacttgacaaaagccagagtcatctgttaagagggaacctcaatgaggaagaggttcccgcaagactggcctgtaggcaagactgggggacattttactgactaatgaagatggaaaagggctccccactctgtgggaggtgccgcccctgagcctgtggtcctgggctctacaggaaagcaggctgagccagattggagagccagccagtagcagcaccgctctgtggcctctgcttcagctcctgcctccatattcctgccttgaattcccgttctgacttccttcatgatggaccacaactgtaaacggtcggtcgtggtcttttaacatggcaacagaaacctaacacagtatctttagaatcaatttcttttaaaaatatgttcatgttttggggttccattttgctggttgcctgccgggtagaatggggtgttcttttctcttgcttgtgccccacccccttcattctggaacttaccttcagtgtggtcatgcgtcagcttgctgagtcctggaatgggtcccaccagtggttcattggctgctgcgtgtctcccagtggcctgtctttcttgccttttccttggctatttactgtcttggtagtgccatatttccgttttggtttcacggtctatttgaactgtctttactaaaatttactttgttaatttttttccctctgatttccagtattacccagatcttttaactctcttaaaactttcacagatttgattaagtaaataaatgcttggaaaatgaatgtgattcttataaataatcattaggtgcttgtccctcatagctgtacacctgaaggcatgtccatctctgaatgcattgcatcttaaggtaggagctgtcaccctcatagtcatggccgcagaatccagggacatgcacggctccttatttactgtttactgggggttccttaatgcttttaataattttttttggcagatcttgtgtatttcttattaggtttatcctgagggattttatagatttttttttttttttttgcttttaatatgaatgagttttcttttggcttacattttctaattgggaatgctggcatacacgaaagctattgatttctgtctattgactttgtatctgggagttttgctgaactctcatttgagtttggctagttattaaaattttttggagcttataggtggatgctcagaattcctgcagatggcaagtcttccctcgctcttctcagtgttcatcctcaattcctttctgggtgttattccatgtctgagtaaatgctaaacgctgatagtggtgtaaggtcctaaggtttcacgtgaacaatgcccggtgaaggtttttgtagaggggactttcttttggtcccacgatgactaggaaccacgaagggtttttaaaaccaagagcactattttagtcaagttcagcaagtaattaaaatgaatttttaagtggtttagaatttctggtgatgttttctgttgagttgttattgagttaatattggaaggggcaatcctttagtcattcatgtctatttctattgctttggacctaggtaccatataatgctttttctctttctttttctttttcttttcttttctttttttttacattgtatttgttggttggtttgtttgtgcacctcagtgcttgtgtggaagtcagaaagcagcttgtgggtcctctccttccaccatgtgtctcctagtgatcaaacttagttgtcaggcttggcagcaagtgcctctatcctctgagccatctcacctcttctatatgataactttttgagcatgtattcttttgaagcttttattgaaatctgtgccagtaaaaaagaaaagactgtggagtctcttggatctcagaagagggtgcgactgtggagccagggagtgagtccagccctcctccgggatggagcgagtttctgggtgttagttttactttctgtaaagatgaaagaatcacagaatctagtttataacatcacacaggattaaactagttaacgtatgcaaaactgtcggcagatcttggaacatgatgagcacttaatgaaataatcattatttaatgcatttatagatgagatgcacaaagcttctatgccattatttttcatctgctgagtctgaaagaaaaatattgacaccatctttctgtgctttgtgtgtgtgcgtgtgtgtgtttcagtttggtttattttgaaaatttggtgtcatgcaatccagcctggtcttgatcttgaccttactgagtagctgagaatgactttgaagtttggatccccttgcctccaccgcccaagcttacaccatcatttctagttgtgcaggctgggattgagctcaggcctgggcatgccagggaagtaccccgcacctgagagggaagtaccccgacacctgagagggaagtaccccgacacctgagagggaagtaccccgacacctgagagggaagtaccccacacctgagagggaagtaccccgacacctgagagggaagtaccccgacacctgagctatgctggttttatgactgaaggtttctgtttcctttttaattttcatcatttttactttatctattttgaatttgggctttaaagttcataaactgtcacgactcttctgtctttggtgcaggctgtcttttatcaatatggaatgtctttgttccttggaactcgttccaccttgaatcctattttgtctgataaacaccttctttttctgggttatctttgcctggtgttgtttttctcactgggttatttttaacctttgtggtgtttatgtttccatcttttataataaattgtgtcatgatgaggaaaatctgacgtgtttaaggaaggttttagtagggaaatttaacctatttacatttattgaaattgccaatgtgcttgaacttttttcttgatactttattttgtgtttcttatttaccattatctcttctgttactttatgccctctcttgacttttgttacgttgtttgggttttcttcatcccagttcttgttttttttttgtttttgttttgtttttgttttttgttttttttttttccgagacagggtttctctgtgtagccctggctgtcctggaactcactctgtagaccaggctggcctcgaactcagaaatccttttgcctctgcctcccaagtgctgggattaaaggcgtgcgccaccaccgcccggcttctgttttaaagacagttttctgaactgagcaagttgagacagaactgtttgtgggtcatgatatattttgttgtaccgtaggatgtttagtgtcctaggtccaggacactacctgtagcacctgtcattatggcaattaacacttagtaaggattcaaggcactgttatgaatttgctctctaattgttatatattatatattttagctgatatttgtcctataagatcatcttcctgagcaaaactttttatatccttttcttgtcatttatgtctgaacttcatcaacacctaagatgaacagattggaattctagttcagattttaagacttaattgtgtgtgtgtgtgtgtgtgtgtgtgtgtgtgtgtgtattttcactgttgaggattgaacccaggtccttacacatcatcaacaagaactttactactgagatacattcttagcctctaatagataacttatccatgaatttaaacttttctcactactatgattgtattctatcccttgcttttggatttttaaagtcaaaacgtctttatgcttctaggtattcaaaaatctgcacttgagtgaccttcagtgcgtttgcaaggtcacccaaatgccaccactgatttcggaatcctttcatcatgcctttaagaaactctttgtatctgttaagcagttatttgctatccctctccttgcccttcctccagcagccacgcctccgctctctgtctgtaatcccttctcattgctggaatgcaccatttgaaatctctctcccagtaggtttgtggaaggtaaattttctgtgtccttgcatttctgaagacatgttgcttcccaacagcttagcagagaattgaaggctcagacattccctcccaagccttttggaattccgcctccttggctgctgtgcacagttggtcctggtacccgctgggtgctgtggagtgctcaggactagagctcacttcctgtgatgtcaggcctctgaggtgggctctgctccccacagagaaggctagagagtgaggtgcactgaggaaagtcccacagacacgacagaggttcaaacccaggccacttggctcaggaactgacatttaccgttccaacttctcctctaaggcatctgtgggtttttgtttttttctttctggaatttttctattttacttgagttctaaaatttcactgctccgtgcctaaataccatcttttttttttttttttatgtaatcctgttttgcacgtgacatgttctgtcagtctgagagacctgagtctttctgaactaaaacaacaacaacaacaacacaaacaacaacaaactaatttcctgtattctttagcatctcttttggaattcctttcatttggttggagttaacacctttctgattttcttttctggcttttcacccttcctgcctctgggctttcgttttgccatcaagagaattcctttctccattctctgggtcacaaatgtgatcttttcctgttttactctgatagtcagccccttcctaaactatattaatggcatagtccattctaagagcagatcccttgtgtgtgtgtggtggagatcacactcacagctgggtaggtgctctactaccgagatacacctcagcccgacttaagtcctttttaatggatgcagggacatgtcccgtttctcagtgttttctttttgaaggggactcttggctcgttctaataggtcctcaagtgcatgtcttgtgctgggcagaccttgataagggatgatgtggggttgcatacctatcattgtgttttcatgctggtctatctgtgaagctcacagtcgccagcaatggctgctgcagactctagtgtcctagagtctcctagaacttagtgccactcgatgggaagtgagctccctcttcccggagactaggtgacctcttcctggagacataggtcctgttgtagggcctccgtggtttccaattttactcctctgtcccagccatccatcctcatgtttgatctgggttatccgtatccctatccccttgcctgccctgtgtgggctactgccgtgtacagcccttccgcggccgtgctttgggctagggtggcgattctggctggtattcatcaaccagccttttgccgatcaggcttccttcaggatttctgccctgttaaaaagagcagcacagaacaagcccattcctgttttctagtacagttgattctcaatcttttttttctttaatattaatattaatattactgtttttggttcttgggaagaggttgatcacaccttagagcaccattttggtctaatctcgattcattgtgtgtgtgtgtgtgtgtgtgtgtgtgtgtgtgtgtgtgtgtgcgcgtgtgtgtatgaccttgttgcataaggaacttataattccatataattacgatgatatgataattattttctgggccattaaaatttctttgtaattgctattttaatgactgtgtgatacagcttctggcgcccttaccttaattgatctgtttctcttttttcctcaacatttcattgtggcaaaatgctgcagtgagcatcttgtgcctgaaactttgtgcacctcggggactacttctctaaggtggtgtcagaaggatcagcatgaatgtgtttaatgtgatgacatgcaggaggcatagcctgccccactgcaggcttagtagctcagtgtgttcacagcagccatagctgttattcctctcaggacgtcttaatcttcctgcagcatcacccagggggctcgatgagcggaagctctgtatctcctccttcagcactttaacctccttttcctttttgcgcccgtcgatggcgttgctctacgcacacatggacaaagaccattcggcatttatcctttcacggcaaacatgtcatcacccccggatccacccgtgttgtgggtgtgtttcaaacacttgctctatccccattctgtccagggaccacttgccttctcttccatgttgtgagcccaccgaggctgtactcacgtgtgagcctctgccatgctcaggggtttgtgattcatctccgagtcagagccagatgaaatagaatttccttcccagcagggctggtctgcaaggttgtatttgtagttgttttcagttcttacatgtagttgtgctgtttctctcacatctgccagatgctgagggtgtgcaggggggcccaggactcggtcctgcgggagcaggcaggacgaggtggggtaggggagtagaggccgagtatgccaacatgtaagggatgcacacactgtctttacttgtgagcagagggctctacctcaacactgcacctcctgccctgggactgcatttttggctacttgattagtttgctgctgtcagagagagctgggaggcttgcccctgcagttcctgctgtgatagcaggtcctaggaagggggaggaggtgaggaaggggaggatagaaggggagcaaccctgctggcatcctgggtaccagacccagcaattgccactcaggcgtcagcttctctccaccatctttctgttcctgacagtgatttctgcagctgtcatgatggcccatcatcctgattttctctgggaggcccaggccctgcttcttgataaaacaggaagagatagctgcaaagaggagtcaggcttgttaaaaggatcctgaaaggctgtctccctgacacatgggagaggcctgggtgaagtgcttgcaagggctggggacatctggagaagctgagaccactggaagcatctgatgaggctgtttcaagggacacatgtgcacatagtaaccggcaaggctgacagcctcacctctgccactgggatggtttgtaggggctatggctattttcatgtgtgtgaggagcaggcagaagtgtggtaagggaccttaagcacctggaccttatctttctgtcagaaaagcccagcttacatgagctgaaggctgtaactaggagagggtctgtctggttagagctgggaaaggcctggaggcccccaggagcagcagctaagatcactgggtgactgcccttactggccctgcctgtccatgcctcctactcctgggaggtgggaggtaaggatgccacaggggctccaaaaggtgatcatgtggagaatctatgttcagaagacaagatataactataggccactgaatacaccaccgcagggctttgacatcactttgcaagtgtttcccctcggctcattcataatttctcaggagctcacacacccacagatacccagtcatgtgtttactggctgtctgccatgttaggggtatggggtgcaggattgtgggtgaggtggtccaacaggcaagaaccaggctggagcaaaagcctgggaaccagaagagagttgtgggattggtatctggaatcagtgtatgagaacaggttaaagggacagctgtgcccctgggctgagtcctgagctgggtacaggcatgccagctggatgccagtgggtcttctgcaggctggagagggatgaggagccaggagggatgggtagatgggtggcaattaggggtaagagtaggatagagctggagggtggggatgactggctggaaggttggattagagtacgggtgggtgaatagatggaaggttggattaatggactgtggatgggatggacagatagacggatgcatgattacagagaaatcgatgtgggtggctaaagaaaatacgcagggtgtaaattgctgggtgggaggacagttggatgaaggggtattagaacggagggatatcgagatgccttgacagaagcagaagggtgcattgtggggcaggaagcagaccagatgggtaacacactaagtaataacacatttacagtggccagatatgcaaacatccagttccttgtgtgagtcagaggttgtggaggttcttaggagctgcataaactcagactcagttgagaaacaatcttcacctcgattctggaccatggtctctctgctctgctatcctggcttggtagccatggctacttgggctcaggggaatactggttggcatgtgtggatgtgacagggctgtttgggatgtatgtggcctttgctttatggaatccccacgggcaatgtgctaagtgcttatgaacattgctcttttgttttccccacaactgaggaggcttaatgtgacttgtccaaggtcatgcactagatggagcacaaagtcctaacagccaaaaggctggtgacaggtctgggcagggcaggttgaatgcagagtctggactgtaggcccaagtgtagggaggggcccaatcacctcaaggggcttggtggctaaccagtggggttctgggcccaacactcagatggcttttctgatgcttctgttttaggtctgaggagactaggcattggtctagctagaatgtccttcccatattctaagctcagtgtggagggccaggacagctggaacctgtgtggtaatattgacatgaggggatgattgggctaagagtcaaggccaaactcaatgtttctgaagattacctgcttctactgagtcttaggcatgtcttacagctcactggcccttttcttcttgggaaagcctgtcaatattcccagaacacctgtagcttctgttcccatccttgggcctgattggcagttccccggcttctcttggctgggcattctgggctctgtggtcacacttaggttttacaggagcccctgagatgggagctgagccatccctaggccacctgccttgtcttctaacatcagagctgatgtcctacttgggacctgccccatcagtattcctggggggctgcttcaatggtgggtgtttgtctaagggggctcatcataaactcatgccccggaccccagctgaagacagtcagtcccatgtcttgcttcagagcctcaggagggaagagccagaagccctccatgtttggaggagacagagcaagctggacttgagctgtccttagtaaagataaagcagaaatcccaaaaagtaattttagtgcattaggcttagatgggagactgtttacggatcatttagtttacggatggtgataggttagtggttagattagcaggaagccagtcagctcgaaaggagggaattaatttatgagattgcaaaggggaaaattgtttgcaagaagtacagcggttttgctgtaatagcagtgagtttagcagaaacaacaagcgctggcaggccttgctgtctatcacagagctggctcccaggagcacctgacttgtgggctaggaacccacaagaactgtggtctatcctaactggggctgcagcctgcctcttaccttcactccagatcaggagacagccacttttgtctccttgatttcctgggctttggcattgaacttcaggagttaggaatctggactgcagattgggattatgggagatttggtgactgagcggcaagtccagggacatcattacatcttgtattgggacattttggaagggaacttccctatcaaaaggactctagaagggatattcttcatggtcctgtgtcacactgcaagagctgtggaagggacctgagtctgaagaatgccccattaagtacacagatgtcctctatgcttagcttgtgaacccaggagatggcccggcaaagccatttctgagcctatgagctcgtacttaagtgacctggtaggtcttgtctctcacagctgtagtatcctcatctgttaacatcagaattgttgtgaggatgacccaaggtgatgcataccagggacctggtaggttccctgccgtgtgcttaggccgggattattatggttatcatgaatgacagggaagttaatcagagcccgataagttccagctcctagtgctgtctcaagcctggacctgcttgctctaggatgtacttgtcttctgcccctcccatttctccttactttgagcccagagtggcttctgtgccctgggctaactgcttcctttcagccctggagctggtgctgcagctgagtctgggcttgggacttgggtctcccatagttgtaagctccgcccttctggtttgttcctgtagcctacacagagcccacagcctctgagtttgatagtctaaagatctgctttgctgtccctaaccctgttgctccttttcccatgtgaccactgacattacccttgggatttgtctgtgacgttccctagttcaggtgttctgttcaccacagactctgggcgtggcacatatgggcacagcagcctacagagggcttagctcacctctcccctaccagtcaccttgtaagatgcaatcagtggtgctttccagacgtggagcattttgctcacatggcagggctagtatatgatgcagctcagactggagtctccctccttaggccctctgtatccacctgcccctctggtgtccgagggctgacatctaaccctctaccgttggtctgtgggaggtggggcaagactctctggaggaacactgtgagtcacagcagcttgggaggaaaagggaagcaaccagacttgactaatgaagggcaagcttgcttaggaggtgactagtgaatgcccttgtccttacctctagcagagaaagggacggcgtggttagggtggggtttcagaacaactatcgcatttttccaggttgagggacttttttgctctgagagtgaaatggctatgatgtcatctgagcctgaaggagctaagccatctggaaacatttggagatggactcgctttgttcccacccacatttaacttagcagtagccaaggctgtctgaactttgcgaaagtgctctctcagcagaaagtgcccgtgtggtggcactcagccacaaggcactttgcacaaattacaagtgctgggaaacacaggctagccctgagggagaagtgggatctcccggttagctgacggggtgggcattcaagcttcactcaggcacatgacctttggaaccatgcaccacctaagggtttcaaagctggtgaaccaaggcaggacagtgccagtaggattgagactcagcttccaaagtccaagctcaggtgtgtggatggatggaaggtgtgagggacaccactgcatttcctggctcaggagcctgtgttcttgggagacagaagcccctagtacttctttggatgtggaatgtgacatggtggtctaagtgtttgtttttcctggcccagacagaagacactcatatctttgggttttgatggaggcacatactgttatggggacacattcttgatgtgataggatgttacaggagcaaacatatgggtgacagtcacctactgccctctttgggtctcctggctgcctgtggggagctgggtaacagtgtgggaaggtatgggatttgacaggcagactttgcactaagcaacactgtgatttcaaggactttttttttaaagtgttttggttttgtttagtttgttgtgtacaggtgtgagtgttgtgtggttgtgtgtgcgcacatttacctacgcgcctgtgtgtggaggccagatgctgatgttgggtatctctgtctgttgttctctgctttgcttttttgggaaggagttagtctggctggccagctgggatcacaggtttgcaccaccctacccgctgtgagtgcttagggtctgagctcaggccttttatttaaatactttaaattgaattgttatttttagtttatcttttgtgtgtgtgtgtgtgtgtgtgtgtgtggttagaggaaaacatgggggagttggttttctcttgccatggcatgtctcagggattgaactcggctcgttggtcatctcacgcagcacacaggtgttcacgcttacacagaaagggcagcaaataccccactggctcagccctttacctggtccccttgaagtgtttatgcgtctctcagctccatcttcctttttgtaaagaagggataagacctacgtggcaggctcttgtggcgatgggctagaatgtgctagctgatgctttggtttcctggctggcaggggaggtgttcagtagatgtcagtttgccccacctcatctcttcctcctcccctcctcttcctcttggcctcatcttcctccactgtgacccacgaggctctttaggatggggtggctgaaaatccaccacactcaccttccggtaccctctgctgtctggtctggagatctgagctgagagataacagttattactgagaagagctggccaagttgtaaatttctttgactttggctttttggaagttcaaaaaataaatatggggggggtatctttgcctccagcagactggggtgcacgtggcatctctgagcaatctgacaggatagttggtgaggctggctgggtcttggtcgagctgccactacttccagagtctccgtcattctgcagaaactatacttgagggcactgggaagccaggggactatacttggtcccatatggcatgggtcttttgcaaagacaccggtaggctgaggcacaaaactgtgattagagtcttggggacctagggcacattagaaataccagctacatattgaaatttgatcaatggtggcttccttctcttaaactgcagagcaccatgactatgtacatagacaaccccagtgtggctctgaccgaaggagcctcttagagtatggctactgggaacatctcatgatgcagactgacttggggcaccatgcctagtggtcatgtgcctggctgaaggacctaggctcaggtagctgctctgaaattgttctgggtcagggtaaagttggggcagggaaccttttctgtgctctgggttccagctgtgagaacaacagacatgatcgcaatctgtgtagctgatggggctgagcaggcacaccctggagagtggccccaagccagggaacttgacttgaagtagggcataaatttgggtgctttacttatgagagtgacctggacaaatggaaggcagctgactgccttcaatgcctgcggatggcatgggggacaggaataggactccaggggctgggctcgtggagggactggcttcaagaactgtctcagatgtgctcctaacagggggttacagaggaagagggacttgagtgcagtctttccacctcattgcagtttagaaggaaggttactgattctctttgaaacacatttggtttattttaggtggttcattaatggtggtatctatagaggccagatgaaacatggccagtactgtaagtccctccttggagtcactgtgaagacatacatgccgtctctagcttaaggttccttctagacaaggattctgcctggaagaacagatgaggcagtatgaccttcaggtctttcctctggaggtgaatcgactatgtctgtgggaaacccagtaggcaagttctgtcccaggactcccagcatgtagcctctgctccctgctccttctgtctgtttttgtctctcttacttccttttttcttcttttccccaccacccctagactgggtttctctgtgtagccttggtaatcctagaactcattctgtagaccaggctggctttgagctcagagatctacctgcctttgcctccagagtgctgggatcaaagatgtgagccatcacctcctggctcacctggtttttgtgttgttgttgtttttaaacaatgttttattaattctttaagaattttatacaatgcattttaagtatattcattgttttcttatggtgttgaataggaacccaggaccttgagcacactaggcgagagctctatccctgaccagtgtgcccagcctcggtcatctctttacgtatgtccccattctttgttctcttttcctctttctcctccaggctctcctacaagtcctccctgcggtacagttcttagaacaagtgctgctagatcacttgatgtgctgtgctttttgttaatggtcatgccactcatgtgacaaggggccccttactgggtggttgagaattctaccctagggtctagtcccatctggatgttatttttctctttgctcaattccaactgtgttcaggactcaccttagtctttcggtcccaagaaaattaattctctgcagctttctatccccttatctccactgcgactttataaatcccagaggctaagacaagctctcctaaatctaccatttactatatcatctccctactgacatagactatttcctatcataaataatggaataatggtgcttttagagaccttccaaccaggtggttttatatacttaacagttggacctccttccttttccttctgcggcatggcacagttcttttgatccacaccaccacacagaacacatttttgggttgctacccaaggtcactctgaggccaggtgtgtaaggtttctgcctcaccaattcatttgggcaaaggtacatgcccctctgtgccaactttccaggacattgtataggagccacggttgaatttctaattgaagtggctctggggttggggtcaaggatcagggaattcattgccccttcatttcaaggtctgggaatggaagagggaccctactggccgtttggaggagggcttaagttatgtgtccttgaagatagagtgaagctgttctggcaggccaggctgggaagtaagtgttcagatgaagagtcaagaggaaggatcatgggggaccatcatcctggaagtctggatgtagaattctcattgagaaggtggcaggcgagggggtgaagaatggtggtcctgggaagcgagggaatgtggagtgtgacccaaagggtagaaggttacaggatgcctgtggcatttttttgcaacttgacacaagccagattcatttgggaagaggaatcctcagttgagataattcctttttaagattgcctatagtcaagtctttgggggtattttcttgattaatgattgatacaggagggaccagcccacttgggcggtgccactccaggcagatggtcctgggttgtatgaaaaagcaagctgagtaagcaatgggagcaagccagagcagtgctcctccatgcatgctctccctgcagttcttgcctccaggttcctgccttgagttcctgcctttagtttcctagtgttgggctgggaccagaagactataagtggaaataaatattttcctccctaacatggctttagtcatagcaatagaaagtgaactagaacacagggataccagatgaatgaggtcctgggagcatcgtgttgcctatagttagcaagagagaaggtagagttctgaaattttttaaaaggtacgtctgtgttaagttctctctctctctctctctctctctctccctctcacacacacaagaaaaaccaaactgtcatcaaaaattaacttttgtttttcagtactggggaacccagggtatgtgtgtaccagaaaaatggtctactgttgagttactgtcacatcccatgtaaatgtatatgttatttccattttacattcaacatgtctttgggcatgatggaacatgatcatactttgagctacccaagaagctggggcaataggaatacacatttaggacagcttgggcagtgtagtgagaccctatttcaaaataaaaaggacctgtggatttagttctgtgcttgccttgcatgctctgggtttaactccttgttccacaaaaaacacgtgtaagatgtgtaacatgatgctgaatacatgtactcctgaagtgattgttgacgtcagggatacacacacacacacacacacacacacacacacacacacacatatatgcacacatacatacacacacatatatatgcatatataggtatgttagtatatatatatttagtatatatatatttatgagaacatgtataattgttatctgtgaatctcaagcatgaggtactgtattactgaacaaagttgctgtgctgtgcatgagagctggagacattttaacagagagcttgtacccttgactgaatctccccattgcctccagcacagcccctgccaaccccctttttagtctgtccccacaagtctaaattctttaggttccacacaagagtgcgaccacatagtgcttgtttctctgtttctggcttccttcaagtataatattctctagattgttcacatttcagaaaatggcaagattcccttcttttaaaaggccaaataatatttcattatgtatatgtatactacatttccattattcatctgttgatgggcacttaagttgtttgaatatcttggccattctgaatagtactgcaataaacatgggagttaaaataccaatttcagttcctttgggtacccagaagtggaattgctgaattatatggtagttctatttttagtgttttaaaggatgttccatgctattttccatagtggctgtaccaatttacaacccagccattggttttcaaaatttccctttctccatgcctttgccaacactgattattctttggacacaagggcattttttagaaaaggtagacatatttaccagcccggcagtaggagttatagcacaaactatgtgtcatgtaaaaagccacgcagttgtatcacttgatcacgtgtagttttcataactacacacacccattattaataagaaacagtaaaaaacaaaacaaaagaaagaaaagtttaaaaggaaaagaaaagaaagaaggaaaaaggatatccctctgtttccaagcacactgtgggcaaggcaggtcagcacctcggacagcgccacacattcccattgtccccattagagtagctggctcacttgtcccaactgtcatacttccctgtcccctctctagaatctttagttttaggggcactttatttattcatattgacttgcccttcaaaatctttgggtctgtgtttcgggggaagatccccatttttttaggaggaggttggcatgatatttgtttgtgtgaagacatgcctacagggctgctgggaagctccgtaagtcatttcctcttccctgaatcccaggcatagttttccgtggttgaggcattggaggaagagtttccaaacgtagagtggattttgaaacactgacttccctcttctccagttatgacagggttacttgagatagaatattggagtgcgtgctacgaaatccacagcacctatgtacaagtgtctttttctgagatcttagctccttgagactcagttcctttgactgtaaaatggggacagtgttacataccttgaagaactgtcatgaagaacacaacatagaggccatgcctggtgggaggggagctgaagtgatgtgagagtctcctttctgaatccccaaaggaaatatgttttggccctagggagggctctgttgaaactgttgattatgagagccaatgtttccttcctcagcacagggaggatggccatggagcctgccacaaagattccctctcttactcctgccccaggctttggggcctctgggatggatgtttgatgctctattctagggcacaggaatgagaagtaggcaatggggactgagaatcctaggcttattcacctacagctgtgttctttgagttttacgcaatcgtaaagctgagatcaatgcctggctaggtcactttaagagacataaagaaaggtttatgggacacacctcaaagcaggctgcctctcagcatctctgctcctgactagtagaacaaataagctcttgcattgcagacagagggagagagaaagagcaagagagtgagacagagagagggagagggagagggagagggagagggagagggagaggnnnnnnnnnnnnnnnnnnnnnnnnnnnnnnnnnnnnnnnnnnnnnnnnnnnnnnnnnnnnnnnnnnnnnnnnnnnnnnnnnnnnnnnnnnnnnnagagggagagggaggaagaagcagaagagacatattgagattaactgactgattagttggttgggtttaaggtatgagcttccgtgcttacaaggctggggtgctggcggagcaggctgggagatgggccaacaatttggagacctaggagggttggttgtgcagacagcaagcagcccggagggtagaattccctctcattttcttttaagtcctctagctgattagataagacccacccacagcatggaggataatctgctttcttgagttctattgatttaaatgttaatcacatctgaaaattccatcatagcagctcccgggctacagtacttcttgacttatggtgggcttctttcagataaacccagcataaattgaaagcaatataagtggaaaatgagtttaacactctcgccccatcagtcatcctggcttggcaatgcagtgtactgtggagtcttcgttgttcaccctagtgaccatgcctggctgggatctgtcactcactgctgttgcccagcattttaagagaggatggaccacctaccattagcctgggaaaagagccagatcccaaattcaaagttgacaaattgtaagccaaaccattgtaaagcaagaaccatctgtagggtttgaccaaacaactggccatggtagctttgccaaattgacccataaaattaattatcatgaggtctagggagacggctagttggtaaagtacttgccacacaagcatgacgacttcaatttggatctccagaacccacatgaaaagacagtcatggtggtgcatttttgtaaccctagctctggggagagagacaggcaaataccggagctttctgcaccaccatcttagaaaaattggggccttcgggttcagcaagagatcatatctcacaaaataagatggaggcagattgaagaaagcatcagatgttgaattctggctttaacatagcatgtatactgacatgtacacctgtacacaaaagcgcataatgacgctcccccataagtttactatatcaggtgggttttgtcatcatccatgtccttacggtttttccccaagtgcatgtgagggtaggcctgagagcatctcacacccatccacagggatagaccatgctagctgaattcggacctctgcttccctgctttcctgtcaatgatatattacctaccctctttttattcattgccttcatctttcaacctgtaacatggaaaagatagcttgtaccttctaggaatgccaaagactggctgtactcatggatatgacagggtgccaagaccatgaatcctagcacaagaatggcttaatttcttcttcaccctttggggtttcttcctacagcctggcccctccttgactcctgggttgaggtcatgggcagaagcagcattcagcttaggtgatgcttactggatcctggtcagggcccatgaacaggctggaccttctgtgagacctcatcagcagagccagaattgagcgggggagctgagtaaggcacgagaggctaggacatggagcatacagtgcgaggtgggagcaagaggtttcctgttcctgcctcccttattgtaatcaggctcctaactccctttcttggtgctccttaaacatgcagtttgaatccccaggaggaatatcagagtgtggcaagaactgaatgtagtttgaagccatctattgaggttgtcagggaggaggcacagtgaagggcaacagagtgagctgaggtctcttcccttggaatgctctgggtatgtctcttctaagcaggatgagaacagataggtctcttctcagggccgagggcttaacagcctgtagtgattgagagcacttaacagtccatcttcccatgatagactggaatgccctgtgagagcatccaaatggatgaggtattgggaattggaaagggcagcattgcaagagaaaatgaacagaggctaagaaggcaaaattggttgggtcttttaaaggtcagtggcattgaggtcagttaagtctatagataacttgctgaggtagagctcagagtattcagaaaggcactgggaacagtagtgtgtattctgtgccagcatcattgccccgacctgcctgcatgtgggtgtcttagagagagtttaggtaggctctcagtagctacctgtggagcaagtgagctcccattaccacaatcctagccatatctcctaacagctgggtgtagtggaacactgtgagacatacccactgggaagcccagttgtcttctctgtgaaacagggctaataagactgccccatggggccatgaggaggaggcacatgcctctcttgctgagtcagatccatgccatgggtgggatagtcagaactgagttctactcatgtgatacactgtctcatatttagaaaaactgtccaatcaatagaagttttcttccttttatttctattttttaaagatttatttttattatttaaattatgtgtctgtgtataggtatgtgcacatgagtacaggtgccccagaggccagaggagttgcatcctccaggagcttgagttataggtgcacgtccatatgcccacgatccggattcaacagttgttaatggtttttaccatgtcggcttcatcttctttttttttttaaatataaagtaaattgtagacatcatgacatctcattcctacatacaatagtccaaccatattactgtctgtgattttggcctctcattgaaagaagggtgatcatgttattgagagaatgagagaatatattcacataacctttattgtagtttgttgtgataattgttttatcattagttgttatttttaatctcctgatgcacctagtttatatgctaagctttattgtcaaagtgtataagtagggaaaaatacggtaactacagtgtgtggtagcttctgactcctgcagagggtattggagcagattcatcctgggaaggaccagtgtacttaaatgtgggcactagatttggaggtacagttggagattttcctatcaagaccataataataatgatttcttaacataatctaatactgttcatattcacagatgaccagttgccctaaaatatctcttataattaattggtttaagttaggatgcagtccaggactcattgtgattggttgttgtttcccccgagtctccccttatgtaggcgagtgttttgtcagaatcatagacacacacacaaatcacatggaggccctgctagtatgcaatgatttgggcctgaaattctgcttctctaacaatctctgaagtgacattacagttgatgggccgctggatgggctttgagtggcaaaggtcttggggttagtatacatgtgtgtatgtatgcatgttttgcacgtgtgcgggcatgcacacatgtgtatgtttgtgcacatgcatgcattcatgtgcttacaatatctggaatcaccactaatcactcttccaccttattcattgaggcagggtctcttactcaaacctggaactcatggatatggctagtctcactaagcagcttgctctgggatccattatctgccttctgttggagttatcaatgggttgtcacacctacctggtatttatgagtgctgggagtttaaactttagtcctcctgcttgtgtgaaaagcacttcaaccattgggtagtctcccaccctagcaaatctcctgtctccttcctttcctacctcagtgaggtaatggtggaaaccactgcttctttcttgcacatggtgggtcagttgtcttatagaatctgtcacctgctggatctagccatttgcttctcatggtgtcatttagctcatccctatatctccacattgtctttaatcagagttaggcctggatataagtgtcatctagatatttatttgtgatgtggacttgtggctggggtgctgtgttttctgtatcacatatttaaaacgtgcagcttgatttatggctggacatcaaacttccattcatagctgtgtgtcatgtctacttggggctaggcaggcgcgtgctggctgtgagcatatacattttcagaggggagggaaggatccactggctacatgaggtctttaaagtggtattagaagactttcttttattcacaaaaggccccacagacaggtttttttctccttgcagggacattagagctatcctttgtccctctatttttacctcttcactctctgtgacggccctgctgggcgaggatcgctgtgtctttctgcactgcatcattccatgaagtaagtcccaaggagggattactcactgtgtgtaggatccacctgccaggttgggtcatagccttcagaaccccctcatcccctcgggcatggctttgaccatgtgatgaggaaggctagggcagagaaatggagctgtgctaggaagcttcttgtgtcaagagcaggaagtgaaatggggcagaaatggtgacctgggagacaggcagtcaagtacagccagcatctgagcccgttttggagatagatgtagctttagaggctccttcagctacagaaccatgcaagcccctaggaatgtgcttatatctcttgaatgggaattactgctggtgtactggctggttttgtgtgtcaacttcacacaagctggagttatcacaaagaaaggagcctcccttgaggaaatgcctccatgagatccagctgtaagacattttctcaattagtgatcaggtgggggagggcccattttgggtggtgccatccctgggctggtagtcttgggttctataagaaagcaagctgagcaagccaggggaagcaagccagtaagtaacatccctccatggcctctgcatcagctcctgcttcctgacctgcttgagttccggtcctgacttcctttggtgatgaacagcaatgtggaagtataagctgaataaaccctttcctccccaacttgcttcttggtcatgatgtttgtacagaatagaaactctgattaagacacaaaggttgtgaatatctgccctcctaacagttccaaggcattaagaaaggagagggatcgctctaagcaatgcttgttcaacttgcagagtctttggtaccagtgactcagacagaggaagggctgcatatgttggctgtctccttccaagacctctgggtctctgctgtccatttctttggaaggctcagatataacattggaatcttatgttgtgtccaagggttcactggatggtgaacctccctgataagtgggttcagaactggctaagaatgagcctgctccccttgttagagcttgcagagctgaagagaagagcacatgtgtgcaggctcaggggaaagataatgctgtataattttataccatcttttatgccatggcttagccacacaccattagcacaacaggaaggaaaatgaatggaaatgaagggtgtcagtggtagagagagatggatggagatgattgagtttagatttttctccagtgcagcctgaaggagaaagttgagaggtgccctgagcaaggatctgtcagggtccctcccccacctccagattcagaggcatctgggtcacaggccagagttacctctgagcttgcctattacctgtgacttggtctccatggtgacagggccagctgtctcttttctgctcctgtaatgtgagataggctgttttatttctcaaataaagatttctccccttacgccttctgagaaggtaggaggacctttcaggcctacacatgcttgatccatcctgaatggactagtgataaggggagctggcatggcacactctcgactcgaatgtcatccgtggcttagctccacagtctctgacaccagttagctggtgtatggtagaggtggcatttgagcctatataagtgctactgctctgtctcctgcactattcctgatgctatgggtctgtcttctctaaccttctcacctggctctagttctgtgcgccaaactctgggttctaagcctattctccatacagagctggagctggctccattagagtggatcccagttcctgctgcctctaataactacagcgtcattcaaaagtgtttgaaggctctttgagaaggctgttttgtactgcaccaaggacaggatcaagatgagagggtggggctctcaggatgccacacagtggtccctgctggggcatgaattccaagaactccagttgatgctggaatgaacagacatctattatactctgtctatgtaccatcctatgcatacacacctatgacaaaattcagtttgtatttaagacactgtaagagcttaacaataactaaaaattgtaaaattacagccatacatagtgatgtaagttatatgaatgaagtatctcttcttctcaaaatattcttttctttcccccagccctccaagtgggaacaagggccttggtgctggcaaatgtgttagggagtcttgggggctgtggtggccgagtttgtaggaggtacagggagaaaggtgaggaaaccaactccagattgattcctgaaagatggagagttttccagggaggtgggaagagcatctttaccatctcagaagatgagctacaccaaggcagaatgaactctattgagagctgagtgctggttgagaatcgccaggggtccccaatacccccatggtcctagcatgtagctctgtgctcactgaagcacaccagtgaggctgactacacagccaaagaagaatgcttatgtaacacctcgaaatgcagtgctaccagaatggaaatgacagagcagaccccatggttctattttaattctgcgaattcccttccagttcctggtccatgggcatatttttaatcaaagcacaactacagttttggttaacggctttctttattatactgtaaacatttttcactgttgctacagagtttccgtaattaccatttcaatggctgcatgaattggccattaagttgatgttctttaattttcttaagcatcccccttcatgagaggtttagattgtcttccagttctggatgttataagtcacatagtgacaaacatctccatggagtagccctttctacctaatgagcgcttcttagaaaaagtgaggtgcctcaggaccacaggaggaggtggtttttgtttttgtttttgttttttgtggtccttggaatagtagtgactcaaaattgttttcagaaagagtcatttggatctgagtgtgattgagaagatgagttttatgataatttaaccagcattcaatgatgcaatcatgaatgtttcctcctcctccttgcctattttaatagatataaagcgatttcctatttgatttctagagagatggaaccttttcttctgtgtcatgccataggtcgatgttctgttcagcccattcatctggtggcatcttgaagcttttgaaaaataaccattcatacaagctctttactgtacagagttaacagtgttcttaagccactttgctacaaatattttttatagactattttaactttagctgtcttgtttattttccacaaagcttttgtgcttacaaaaaaaaaaaagatttttgagacagactctcactatgtagtctagactggccttgaacttcggaccctcctgcctgcccctgttgagtgatggaattctgggcccgcatggccacgcccagcagtttgggacttctgatagtattgaatcaattatctttttatttatattctttttgccagcatgatacttgaaagatatcactctctctaaagaagagagaaaatatttttctatttcttgctgtttgatgtgttggttcgaccctttattctctctagagtttattttacagtgcacgattgtacggtgtgtgtctgagttaatcacgtttcctcaaaaccaccagcatgatttattaatcaagaattcctttccacattgttttgttgatggttgcttctaatacattaaattctcggtgtaattaggtctatttctggatttttaaattccgatccttatttctattttggtgtgagttctccagtaccctgattattatcgctttataatattttcatatctgcttcccttacagttcttttcctttccagaattttagctaactttctcatctatttattttcaaaattattttagaataagtttattcaattccttaaagaaatccttttgagatttttgagtgggattgaattaaatttataaattaagttttggggaaattgtcatctttataacatgcagtcttatcatctgggagcagttattttctctatttattcaaaaatattttataactctctattaaagtttagtggccttatgtaggtcacacacagctctagtggcgctcattgctgagtgcttgtgttccttgttgcctctttatgtgaggcctccttgttcatttccccatgatcacagcacaaggttcctaaaaattcaaaatctgagggctccagactccgaagtctgagcataggcgtcaagatatcacaagtagaaaactctacaccatgaaactttatttcatctacaaaattattaaagatgttatataagttacactcagtttatgtgaatatgatgcataaaacacataaacaggttttatgctgcgtcttggatcccattctcctattttcttattatgtacatatgcaaagatttccagatccaataaaaatccagattccgagacaccactgacaacggctactcagtccatctgtgagagaatagttcatttttaaaatcacctttttatttatcatagaaccaaacagcaatggtaactgcagaattaaaaagaaaactgaagcgcctcccacagtctccccggctttataagggggcttaatttttctgtggttccattgagagcttgtctgtgagcagatgataggcacagctgtggccacagtggcaagcctctttatatcccacagcctcttgtatgtcatctcttaattgtttgccttcttaccacagagttttgtccctggcttcatttagtggtgagtgacgggcactgaatgctggttcccaggcacgtatgaaggtgctagagaaggcagccacttcgtggggcctctgtgatgaactcagggctgatgaaggttcagagtaggacttgccagagctaagcacctcccagctcctcagacctccctgtcaaagggaggagcagggaggcagcaacagtgatcacaggagaattgggcaaggcaggttttgactttactgtcggaagctgtccctctatagtgcagaggaacgtagtgccttctagtgtcttccagatctctttgacctttgtgctaggtggccataaagacaagcagttggcatttctcccttcctggtcattctttgtttaaaatgcttgttgaaagttgttagccaccagggggtgtgtatctggacaggacaagggacagtgagacccacactatcactgaacagaaccccaacatgccagtgctggtgagagcacactgagcctggaatcagcccactgatctcagctcctcccctctcccatgccctttcaccttctctcttttcaaagctctgtcaccttgtctcctttccatggcacacttcccagcagcaggcacgacttcctgtgtttattttcatggagaagagaaacgttatcatcagagacctttcttttgctccacccacacccctgcctcttgtcttggcttgccgtgtctgggatgatacgctcaattctgctagtttgcccacatcctgctggatgcaacccttcccttgggttctatgcaccacctcttctctgctcaaggccactgccctagtgagtccttccttcatcttcattaccaccgagatgctctctctgctgggttacttccttgagtaacaaatacattcggatatcaatttttaattagaaaagtttggattttatgcatgagttctgtttttataacatttccagccttccttgtttcctgtaacctaccatgtgtccttccttaattcatatccttttgtctttatcattttacacacacacacacacacacacacacacacacatacattctactgagtccatttagctttgttcatatgtacatgtgtttagggatgaccacgtatgacatcttcttaagcagtcctggccttgaccctgattgctgtccagtcaccggggtacttccttctctttacaataaagctctccattttctctttttatgtatgtatgtatgtatgtatgtatgtatgtatgtatgtatgtatgtatgtggtgccacagatggaactcagggccttgtgtgagctaggcaagtgatctactcagtggctgcaaacccagccctacaatgaagctttccaaaagaaagatttccgtctccaatgcttttctaccgttcactctcgaggcaactgccgtgggcgtctccctcctgactccatcagggttactcttgtcaaccccttgatgcctttcaggtggctcagcccagtggaccacagccttcctcctccttggctctgctcttctctgaagcctgtgtctgggggctctccttgctgctgcctctgtgagctggtctattgctgtgttcttccttatctcctaacctataaacattgttgtggctcacggttgagacctggagtatcttcttctgggattgcacttcttcccttggtgactttagtcctcatgacttcagtactgcctgcatactgatgactgtcatgtggcatgcctctggtcacccagtacagacttgtcatcggtattcttcacctgtgtggcttacaggtttcttaaatatttctacaaaatcttggtccttcagctaaaaggagcatctcttgggtcttcatctgggttcaggctttggctcactttggatttctgtacttcttacttctcccaaagcctgtctttctagcccagcctacttatccttacacagctaccacctgggctaaactgtagtcctcacctgattgtagggaccgcctttggacaagtgtacccacttcgaccctttgcccttctgggattttctcaccaaggagccacataggtacggataactcataccacagctcccttctcatcagagaagcagacaggacaaagtaggtttttttaaagctgcttgggttctggccacacttctgcctcctgctgtcagccaccttgctttggctcttaagacatctgcttcaagtcctccccagagcacccctggatcttccctgtcctcccgctgtctccctgctgtggctcacccattcctcacactggctccgaggtcctctgcctcaaaatagttctatctgcaactgcagtcatttactaatgcattctgtcatccactaattcattttagttgaccttggagtacttgagttcattgacctttttattgactttcagtattttcttcagtgtttctgcacatctgcgtgcacgtcagtttccatttgactagggtgatgccccacccccctgcactgcagaggtcattgtaggaatggtgcgggaacagtgcctgggccagagttagcactggtggcacctggggactaggtaaatgatggtagtggagtgtcttcttcctgcgctacttctcggtgcctttgtcagataacacacccgttgtcagcccagggctggtgtgggtcagcacctggggccctcagggctgaacctagaggctagggctggaaatcacagattgctttgtggaaaatacaaatgggttttgctctgagaactgatttgggcttttgtttgaaatgtaatatacagaataataataaaagaaaaaagtctttaacatgtaaatggctctgttgggcagagccaagtaatcaaatcaaacagctcttcttttctgtctgccctgatccccgaggtattgctggatgagaagtgcttctggggcttgttaatgagctgcccgggtgccctggggacagtgtttggggggggggctgctcctccctggctggtattggtgtttgtggccccccaggggtcacagagagatcctgcagggtgtgtagggacagaaggcagtggaggctgtcctaggaagccaggctccaggaggccaccggcatgctgggcatgctgggtgggagagagcaacacatgcacagactggcaaactggctctgtctgggtgtcacagcagggcagggtcggcaaggagggggtctgccccattgagcctgagctctttgctctctctgggggtttggtgtttttgagtctttccttggtgttccagttcattgctcttccacagatgataaaatacattagtaaatgattacagttgaggataaaactaattcagggcgggagaccatgagaactggggcaagcggtaggggggcccatccatctgttcctctccactcattaaatcccaacatttcccacccccacacacctggcctccctcacgtgctcccacagacatgcccctgcacacttccacgagtctccctacaccagcattcactaccatcagcctgtgcagctgtacacacacacacacacacacacacacacacacacacacacacacacacacacacaccttcagggagagggagggggagggagaaaggcttgttcctgggtgaaaggaggactggcacctagctttctctccagccccaggggagcagatctctgtttgctcagacgactccaaggagttgcctggggcagccatttctctgagagctgtcaattggagtttaccaacaaatgccaaggagctgctgccctgagatctgaagcttctccgtgggattgtgctccttccctggggcaggtggctgcagggtgacacaggaatccattctctatgtcactctgctccctgttgctcatcttggctgctgtcattcctgtgtacccttaaatggagcttgtggatgagcagggaacttttaggcagtagaagctgtgtgtgtgtgtgtgtgtgtgtgtgtgtgtgtgtgtgtgtgtgtgtgtatgggggaggggcggacggtgcagaggtgggggatggggaatggaaagtgtggtacccctcctattccttcctgtatgcaggatccaagtctgtggtagggaagaccacataagcccgcatagaccgtcctgcagcctgtgtgtaggactttcccctctactgaccagacagcctccttcctatcctgggttgtaggattgnnnnnnnnnnnnnnnnnnnncatcttgggttaaaactttagttttgggattctggctgggccacttgactctgtcagataggaaggagttccctgatatcagagctgcacatgagctgttgccacttgtcctggtcctaggtcttggtcaggagctatgcctgtgtctggggcatggatggcggactggtttttattaagtggttcctttaaggatggggtgtgtggcccttatgcctgtagggcttcctccctggtgtaggacagacacaacaacactgtgatccatggctcagctagatggaacacagaagtggtacggttggtagcctttgcccaggagtgtcttcctgttcaggactcacaagagaggaaggcactgtggggtgactgggcacggctttcggggagttcccacaaaccttctactgagtcctattcttccccgctgggttccctggcttctcctcctcagctaacttctgaaagttgggggtttgtgtatcttgcctgctgtgctgtggatctggggtcacctgggctctgcttccccttattctactgggctccttcttggcttcactcccgggcctcacacacatggcccagggtagcctccctccagatgggctctaaaagagcagaagggcagtgagtcccatgatctgtgtagctgtcctgggacatgaggtggtcagcatctgggacctccttggccttgcgtggagccttgcagagactgggaacctgctccgtttgctctgggtgtttcctctctagggctgctctctctggccgaggcttcaggacagtatggactgaggcaagccctctcttggttgcctgtgagatgcagaaaagaagctcctcccaccttccgcactgcttctggcctcactctctcttgccccttactgccctgaaggaccctgtccttggctcttcctcccgacagagcatctcagtgcccccagttgatggtactgtgtctctcagtctcttagtctccattttctgttttcctctgtcttctctgtcatgaagtcctaagtagtttggttatctgccattcagttcacttcttttggtgggcacggagagatatattaattaagtgacagaaatccaagttaaactagtttaagtaaaatgagtttttttttttttaagcttgctttttgagaatatatctagcttcatacatggctgggtctagcagtttcagatgatcatgaagccttctattcctgctttctctctcaggctcctcctgtgttattttccccttcccttctcagtctgccctgcctgatggtaaattgaccacaggacctctcccaagtctgatctttagtgtctggtcttagcatgagtgagggtcccttcttgggaaacttcagcagaggtccgtccagcgtgagtcagcagcacatggtaggcaggacatttcaattggtccgatctttctctgtaggggaatgtccagtgtattagagaaggaggcgggcaggaggctctgcggaagaaaatgagagtggggattggggaaggcaggctagggcagccctgtggcttgggaagcagggaactgggatgatcagaaccattttaagaagattaagccagcagccatggggagagtgggtgggccatgggacgtggtgaagggggccagaggaagccgggttgaaatggtgtgtgctgactcactaaggcggtaaagagcttcaagggacttgcaatgctctgatattagtaatttaccattaggaaggtggcgtaagtgataatactgtcctgtggagcttcctctctgtttctcgtgaccggctgatattcctggggtgaagatgattgctctgtcttcgccaggcagtatggagctgaggatgctgtacctcccctgcactcttcccaggcatcactgtggggacccaccagttaggctgctcgccttgagtggcagaagtctcatcaatctattcctcaagcgaaataggtgcttggatcaggcagactctaatggcccagggagcaagagctttggaagtgagagcatgacatccatactgaagctggagggcaggcacagaggagggagtcctatggctgtacaggaaggagctgagttctgggagacaggcaggtttgctgccctccggtagcacatgcactatctcagtagtatgcttgcattgccttctgtgcccacgaggctggactcactgtgcccagggaagcccttggccatacatttgaggggaagctatggttgtccactgctagatggagctttttttttttttttttttttttttaatctgggagtttgtgccttgctgctttgggctttgggaggtaatggctgcagtgaagtttgagcgcgagcctgatgacgaggatccgaaggtaccgtgttaagttgttcttcttcaagcagcacgtaggcaggcctgcggcagttcagcaggactttttggctcccataaagttccatttcatttgagtcattttgacgaccaagtgttttgtgtggatgttgcgcacattctagaataactttgagagttctccatcatcatcttgcatatcttgtgggcatattattaacgtctccgagtgcacacctctttatttttgcatgcagtgcaggtgatagagccactgtgattcttataatgacctcctacctggatattttggcctctcttcagctccctgagccctttccctgtagccttgcttgttgagggaataactacgcaggagatgtgggagtttcttggcatttgccatagaacttggctatggataggcaagcaggtgccacagtgtgtgtggtaagagtccccaccctttcttttttgtgcacatacttagattccgccatatggcttggcctttgacagagcatctttggactgctgtgagcatagccacaggtgcctttttctaaaggaggtgatagcgtgactcagaaatgggcacttttagttggaggcagaaatttgcagagctgagctgccatgtggggtgaaagaggaggaggaggagaaggagaccatcattgctgagggagaattttcctgcagtttgtaggaacatcctctatggctgctgattgcagtcacctttagcttgcatggctaggagacctcagaaaactccaggacagaacaagctcagagctgaaagcacagagctcagagttaaaccgactactgagatgtcacccaggttggggaaacggttaaagaaggacgtgaaactagatgttatggaagacatcaggtatagtatgtaggctgttctgtgcaaaccaggccatgagaaggggtcagctagctgtcttctgtggcctgtctgagagtctagctggccatactttgcctaggaagcaaagaagctaatgcacttgtcctaaggacaagcctcatacacagttcttgggttgggaacttgtggtccttttggactcaggggctgatgtctaagcactgtggactgggacagtcagccgtgggtcattttcatgtttcccctctgttaaaaaggcacttggtagagtgacagtagcatcccctgtcaattgagcagcaagttactggggccaggcacaaggctttcatctgattgccctttgtctgaggtagcccccaatgctcagttagatgtgaatttatcagtgacttgacctgaagtaccagtcccgcagagaaatggtggggaatgtgttgatcactgccactcccgtttttcctatggcaagtcctcttccccatagatctgctctttcctactctcatctcatggcatacctggagcctcccatgctaggctcttcaacaacttccacaaaccaggctttctccgtgtatcctcctggatttcatcttaccagcatttagggtcctatactgtgtagccttcttgtccctggatggagtggtcctgtctttctctctctctctcttttttttaaatgctctcacacacagccagaagtcatatgtccatcttccctatcagcccctggggcttccaagagtcccagtaacatagcctgaaggagcaaacaccacatggccatgtctgggccctggccagagcctgagcaatggtggctgaatccttgttgatgactgaaggccctagtttctgccccatatgtgtccccagttccttcctaaggctagtggcaagtgtcagtgttggtagagctcttgctaggtgcctgagtgcagaacattagtctccttaagggcaggcattattgttaggtcatatttcagagtcagaaggttagaagcagctaagtttctcatgcccagggtcaggacctggtaggttatgggtgcctggtagttttggggtccactctccctctttctgacccagcatctcaaccacatgctgaggggtgagcctgtcttccctggagaagctcttcctggaaggcctgcctcaaattctcaccctcttccctttgacctcactcatgggagaaggtgtgtagggcgtgtctgaagcccatggaagttcccccaaatttagtgacccaagcaatcaagaaaaacatacctgagcctgggctcttccgctgctgagggaactgtagcagccacttcatttatagcatcagccacctgaactgagggacgctggctactccccatggcatcatttccaaatctttgattgggctctgatttccaggctgctataggctgatggtccaggctcttcttcatacctttttcctattatggaggagaataaatatctctaagcttgtagtgagatccaagaggaggctgtatctatacttaaacaaatacctgttcccacgctaggtgcctgtatatatacctctatacactcatacctctgccttatctagacacctgccttcctattatttatttagctagttccattccctaagtcatgccttacatctttatttatactcatgtttgtatctatatctcctctgtacctacacccatacttacagctatacttagagctatttctatatctccctcatacctattcctgtacctacacatcatctgtacctatggctatatctaatctaccttgcaccaacacctacacctactgctttacctgcctagctcagaatggagtctggttcttgggagccactgagtaggtgtagctgatacatcatcactctgaccaaaggccatggatgtgggcagcattggtctgtggagccgggtgataccatgacacactgcctatctatgctgagtgctctctgacttactctcagcctgacctacacatgagacggtataggtttcacgcttcgtgggtcatgtctgaggggcctggatctcattatttaggtgacacattgagccctttgttcttgtgacatgcagtggctcaagtctcctgggtgatcgtttgtgggtcattaagtaaggatgtcacatggagattaaggaagcacgtcactacagggtttcactgtgagcatcacatgcaaggtgatcttgtgtatggcaatgacatccagaaattcccctgctgccagctgaaggcagacacagcaagatggtgtctggctcacatgttgtgaccttcaaagccattactgtcagctgataccagtggcaccttggtaaagtgaaccagggccttgttaggttttagagtctggggcgggtgggttggctggactaggaataccctggacacttctgttggcctagggaggaacagaggcgaaggtccttgaccaccaggagaatattgcttctttctttctccgactccaagtctccacagagggaagactgctgatgtgtaagctctaaagccatctgagcaacttggggccttgaaacatttgcaggcagtgcaccattgcactgcactgccacagtgtcatagcaggtgatgaggctgtaccttctacacttgggtagagctaaggccaaatgagcacaggtccttttcttcctcatcggctcctgcctgtctgtaccttctttgccatctcatatctactacctccctctgatactgtctatgccctttgcttggatgctggcccagggtgtgggcacctggcagcaggtgacatcccagtttccccttagcacctgccttaactgggacactcacttggcctttatccctgcactgcctgttgtgcttagagcccacaagccagaggtcataagcttgtcacttgtagctgtgcttcctctgaatggccttgctgcgtgatggcacttggtgacctttttcagggctctctctgggagctggcggaagatgggctggcttggcagtggtggcagtggatgctgttttgtgagcaggtgctctggtctttgcagagttgcacttctagtctccttagcttggaaacagagctcctgcattcctgttagcttcagtgaggcagagcctcatgggaggtggctaagctgccagtagatcctctgactcagtgggagatgtgcagtgatcatagaggggtggaatgcatgtgctgacacagaggcatgccattgtatgcaacaatgtgtatgtgtgtgtgcatgtatgcacatggatttttctgtgaggacaggtgtatgaatgtgagagtgggtctgtgttgtttgtgtgaacagatgtgaagacaggtgtatatgggggcagatgtgtgggagcagttatatgtgaaaggaccccccccaccgtgtgtgtgtgtgtgtgtgtgtgtgtgtgtgtgtgtgtgtgcctgcgcgcatgtcatagcatcttctgagccatcttccttctctgagtaagcctgtcccactgaactctgctcatctctgccaaacccctctcctccagccaggcaatgggatattccttgggcccttccacacatcataatctgaactggataaaagcactgggcttagggtgtccggagtcctttctgctctgtcctcttgagaaagcatagcataagttaagggaaagatgactgcttataagccacagagggtccttagagccttcttcatggttcctgttagaaaccagccatactaacatcgccacttaaaattccattctctgcgtctctgagaccatatatttttgttactcaggctacttggttgctggcattctgtgggagcatcgcactgaaccatctttgtacctttaagattgtcttaccctttgtgtctgtatctgtgtgttttgtgtgtttgtgtgtgtgcgcgtgcacatgctcacatgcacgtcatggtgtacacgtggaggtcaaaggacagctctgtgggactgtctttcttcttctacctttatgtgggttctgatggtcaaactcaggtggccaggcctttaccagtgaaccatctcactagcccccaaactttgttgttattggaaagactacattggagctgcaaaggagcgggggccagaatcccagtgtccccttcagtgacccctgtaatgatgcgattgtataatggagccctgtagtgacttcctcaaggctctaccatctcccaatagaaccaccagatggtgaccaagccgtcacacatggcctttgggggacagtcaagttccaaatcatagcaggtgcttttgtggtggtggcagaccagtgagcgtatttcagagttcttacaaagtttgcgtttggtgctttctccttcttttaaaaatgttttggagatgagatcttgaagctggctgctcggccattttgttccaccttacaaaaagatattgtctctgggtctgaaaatccagggcgatctcttttttctttctctctttcggaaccctggaagatgttgatgcattctttctcttgtgtcttttcatgtctggggaggaatttgctgctcttcttatcccttttcttttgaacacagcgtgccttaactctctggccgcctctaggatgttttctgttatcctgcttttgaatatcttggctgtgatgtgcttttctgtagtttcttcccgtgtttcttctgcatgaagtttcttgagattttaggatctgtgtgtttgtagtgttgatctaatttgcaactattaataaattgttaatgtactggaattatcccttgaccactaatgtcatactttctctctctcatctttttaaagactgtctcctttcgggtagtttctttcccatgtgtccacgtgtgctaactttccctctgccccttttgccctgccactcagttgtctcacacactctcatttctcatgagttgaagctgggatttcatcttcttttaaaaccccatgctgttgctttaaagctgtaaagactgctttaatatcccgatccgccaggtctgacatctgggtaggtgtcggttcagttttgctaggattttcgcccccttcctatggataatactttttcctgttttttaacataccaagtgacttcgactggattctagacagcgagacagacacctccgtattcctagaagcactggagcgttattctgggatacacatacctggaagcagttaggcctctgtgacttgcttttactgtttgtcaaaaagtaaggagttgctgctgaggtggtagctctctgtgcactctatgtagctaatagcctgggaacggagaggtttctcagtctgtctggacgctgacaccgttctgtgccctgtgtgagtggcagacactagtttaataccctcaaataccagtttgtttttatttccttgtgtgtgcatgcgcgcgtgcgtgcgtgcgtgtgtgtgtgtgtgtgtgtgtgtgtgtgtgtgtgtagggggtgggtttttctcttccagaggtatgtgaggacaggatttatagtgaacaagctttagtacagcccaggtgtcagggtccctgaggagccaagaatgaaccccccactgtgtgtgtgtgtgtatgtgtgtgtgtgtgtagggtttttgctctgtcacctcagtgggcacggttcattaggagcctggctttccctgtgtctcatatggatgatggatggtatcaactgagtctgcccatcagtctgcctgttccatccctccagacatcttggaggaagtgaaaggttcgaacaacccccagcagaggcagttgagggttacagcaagtgttgctgctgtcttggtactgtcctgggaagcacttattttcagctgaggatctcagaatcgtgaggacctctccgagttggatgtgacttagcttgaatttgaacccatttgttctggaaaccctggtgtttctaacaggcatcattattttccgtatcaccttagagtttgtcgctagctctatgtggaaatcagctgggtagcctccctttagcccctgacccctttgcaggcctgactgctacaagccatgttctctcagtgctggtctaggttggaataggttggcctatgttgtagtgacctgcaacgctgagacttcttgcttgggttccatgtctactgggggctgttggcctggtgctctgtaccttacgggcatcttctcactccagaaaaagcagcggatggacagctactgttggttggtggtggtgctgcttggacaggacagaacttcagagcaaaaactagctctgacactcctcctcagaacaaatgttgccataactgctttgggcacattggcagtacagcttacctgccagtcccaactcagtggtgtcgacgagggagtcctttgggccagtacagcattcatgggtactgacttccctgtcagtgatggctttcagggtgaaactcagtgtgagggaattgggactgtacagtgaagacagtcgtgtctccccccccccacacacacacatctactggagctcattgactggtgtagggaccatcctaatacaagagaggaatccttagcctggtcagcctgtgtgtgacacagcaagtgcagactgtgggggagcaccagagcagtgactcattctgccttgggaaacttgcagagggggcagtgcctgaagctccagcgcaaagataagaagttctcagcgaggagcaaggagggagggggtgctgttgtcttgggaacagatgtgcacaggcagagacccagggcagctgctgggggcttacaaatggctcgtgtgtgtgtcttcagtgctgggacctatgggcctgtgtcaggaaggaggatgcgaggaggggacttggagtaaggctttctttctcatgggaaggatgttacatccccttgtctctcgctgcccaatggctaagctattgctggctgaagagttctggctggtgggtgtggctggcgctaggaactacctgcctggcaaaaaacctatccccaggtttcagggctgaaggcaaggctaaacccagctcccctgctggcagcccctgctgttcaccctagggggatgaatcagctccattcttggtgaacaaaagctcttgggttgccagggagatacaggcagcagcagccctgtacttcctggagctagagtttggtgtcagcaagagataggtacctagcagcactgagcatggaatccagacctgcccacaggagagcagactttgcttgacctgtcaatatgggatgtgtcagggtggttcccgggcagtagaggctcaggttctagcaggatttaatctgactatagcccttcccattgatggcacaacttcagctccccccaacctccccgtctgcttcttggagctttctttgtctgaagttgggctaatgagacccagctttagaggccaagctaatgaggcactaggtgcatcccccccacaccttgtgcatttattatgcgctacacatttgtggctgtctgctgagcactgtctggtggccggaatccatgccctagaagagatgctgcagattggatcccgaggctctgggctgggtttgtcaatgttagagacctggaattggggattggagcaagacagtgttcctctcacctgtccccatccgagaagactggttcccatgcacacttgacagggaaaattgggtcagatttgggtggagtatgggacaagtgcagagccccccccccgggggggggtacttggctgtgaggaagttctaggaatccaggaagtgaatttaggggcctggtagagtggtttggggttattgatatttctctgtgtgcatttgtatgtgtgtgtgtgtgtgtgtcagggatgtcctatgagtgttttctaaagggttgcgtggagttagagggccactcgtgggagtgtggtagtgaggtcattgtggctatgcactgggggctttgtggcaagcctcggagttatagccagggtcacaggtgtgtttgggagtcagctatggtggtgttgagggtataggatgaatagcagagtagctccagccccaaactctgtggggacctatttcttttcttgctgccccactgggaagcttgggacaactctgcaagtgggtccctgggtaagaggaatctctgaggtctgggaccaggaggttgagtggcagggcacagaattcaggaggctgagcagcgtgagtgggggcagtgctgataggagaccaatggcgttgcccatctgcagaggcattacttgacgtttgatgttgtcaccaggaaagttgcagaatgaaaataacttttgggcaaatatgattatgatgtccaatcaggagcagcctttcatcgctggaaactgctgacttcctctccgctaaagacaggtacaggtgacactcagtggcactgaaggaagacagaccattgatcagtgtcatcgtcatgtgtgggagcccggtactcctgcttcctcctccatggacctggaagagctggactccacatggaacccctgaatgctcatgaaagctaaagtgttggggagatggcagggctaggagtaaaacatggcgctctggattctgacacatctgagttcaagttcacctcgtgccactgcacttagaaactgtgagtctatgtgggcaagcttcagtatcctcaccttcagaatgggagctgtctctaattcttgacttttcaatcatgcgacatagagcctggcacagatggttgggacaggtgcagctgaaaagactggaatgccatgtgagttaggatatggcttactgtcccaggggctgaggcctgacaagagtcccaatggagtaaacaagagaaagtgaaagagagagggagaaggatggggtggctagataacgtcagggaggtggaggggaaaggagtgagggcagtttaaaagatggaacagggtttgaggagtatccgtccaaaggaagctgggcaaggcggccattcagactgaaggcctaggtcaggctggctgggaaggattgttgagcagcctatggctgtccctagtgtgtagccaaggcgacatctttctggtcatgctactttagttacttaactagccagtaaaagcaaaaggccaggcaagtgcaggtcccaggcttctgtgaaggatggcactactgggaggatttctgagggtggccaagaagcagctctttcccctgcgagtctctgagtctctgctcaacagagttggcctcctggagaggcttcctcatctgtgatgccacggaagacagggccgaggtgctgcgaccaggcggttaggaggtctctgtgttgggcgtctgtctgcccgagtgcctgcctctctgttgctctgaaggaggcaggggctgggcctgcagctgcctgggcagagctgctccttcgagggacacactgctggctcctctctctggttacagactcacgacgtcatgcctctggtctacagcacacctgaccttcacagccagcatgggcatcactatgccaagtcagggaagatcctggaagtctggccctaaggacagagtggcgagggagtggacatgactgaagatgggctctgaagaagtgtagtgaagcttaggtcaggtccacttcgtcagataaagctgcatctggagtccttcatccagggctgtgtggcagggtagagagcagcagggactaaatgtctcccagctgtggggcaggttacagactccagccctgggagaaagtgggacaaggtgctaagggcacacagggagggcaggctgggagttctattaagtgtccaggcgacagagatgttgcagagaactcaaagatgaagaaaatgacattgaagaccaaggggtaaggttatacctgctcgtggggttggcctcctagctccacagtgacaaagctgctgggatgggggaagccagcaacctacagtctgccatggctcagcctgagcatgaagtggagagtttagttaaggctctatatgagaatgagctaagtgagcatccaaggtcactgtgaaacaacatcaacacagaagccatgaacctgctggaaggaagacaactggaatatgttcccagctctgccgtgaacttgctgggttcttagacaagtcccctcccctctctcattttcatcatctggatcctctgtataactgagagctgggcattttcagtctgtctgaatggcatgctcctctcaatagagtgcagtggggtggggcaggggagattcagtggtctatagagtgccttggtgtggggcaggggagactcagtggtctagcctgtcttctgttgaaagcctgctcctaaatactagttggtgtttgtaaatcagctcttattgagacttcctgtgtgccgggcactgtgctaagcatttgacaaatattaattctcttaatttctaaagcagtattgggagagaaggtggggggaccatcccagagaggcaaggtgatgatgcagggtcacacagccaggtctccagcccagacctggggacctaggatctcagttgctctccctgatctgatggggaccttggaggttgcagaaagaagtgaagaaagtggcttgttttgctgagtgaaagaaagaccactggacaggagcttaggactcaggggtgggtggggtgggggtgnnnnnnnnnnnnnnnnnnnntctttctctagagaatgccctctttcctacagaaggaccaaactcctccttgaagccttcccagctgggaccactgaggcccaggggagtcaaaggtgagtttataggggtagcatggcctgcacggatatgtaggaatcgaatgcaggagtttctcttccaggcacacactctaaccaccaaatttatgtacgcagataaaatgcagggggggtgtaatgtcagattaatggataaataaccgtcctgggttttggcacggtggcggagcgcgccagtgagaagcctcattatgtgcggctctgcctcgaagaacaagcctctcgctgccaccccagcaccgggcccgcgaacagagcatgaaattgttggaaatggctccccttcaccctcagaacaaagatgttttctccagcataaatcggctctctctcggcgcgggggccggcgttcccacaaacgcagcctatgctgcgctagcggccgggggagggggctgtgcgcctgggaacgagggcttcctgcctggctgctgcggtggctctgtctctgggcctctggggacaaggagcgcaagtctgtagtgatgtggaaccttgtgtggactgaggttggaattagagctcgtggaaaggcagcgagcgtagtgctgggtgattttttaacctctctgagtgcagtatgttcgcagcgaagtggggccctggtagggagcagagataaggtggaggatgagtgacagatccagcagcagatccagcagtgctaacagctgccaggcacgggggtggagccataagtaccacccagccccctctctcccatccaagtcctgggcagaccagaagagtcagtcccttttctctctcttcgttctctttctcctggaggcagcttgggcagtggaaagagtacccaattcatgtcactgcctagcagtgttaccttgggcaaactgcgttacctctctgagcttcactcttggtacctgctggtggagaacaacaggtccacctttcaagactggttataaagagtgatgtgccaggcacacactgctccttggatagtaatattccgtaacagatgcttaaggagtctagccctaagacacggcaagggcatgccagctgggcatgaccttcagggttttcaatgggaactgggacctttatgatggtggctgctggatgcaagcatgtgtagcgttcataaacacctacccaggccctcttgggcaaacccagtgggtttccatacctcgtagcacctggccttgtagatagtgggttctatttaccctttctttctcctttctgtggccttcctctcctactccatacactctaaggagtttcttgctgatccagattagagatgaggaagaggaagtttgagggattgtcctagacctgggcttggtcatatgaggcctggcgcaggaacatggggtgacctttgctgctaatggacccttggctaggtagtatataaggcatgttccaggcactgggaactcaagtcaaccagttaccaatcttgcagagtttgcttgccttctggagaagggcagtgatgcctggtgacaggcttggggctctgcactcaccgaatgtctcatctgcagcaccaatgaacagattatgtccactctgtcccatgctggcaggtctggtgtgccctgtgtcctccagggatccagcaagtcccaccgatacagagcccctggcatatatgaggcagcctcaagctagattctgtcggattattttttgcagtcatataatttgctggggcgggtctcagtttcctcctgccaaagttggggtaatagtcactccacctctcctggctgggtagaaagcccctatgcagagcctgagcaggctgaagggtgcttctttcatgctaggtgtttgggtctttgtgggctcatacgacacccctcctttgcagcttctacgaaggccatctcttagatctgatgaacacctatctggtctccggtagagcagactccccagacagcagctccatctcccacctgccagatctttgtttagctcagaactaaagacaaagcagaaagcacaaaacctttcttccattgaaagcaagggagctatctgccttgtcagctctggagtggctcagcaaggccaggaggctggtgatgggtgaacctgtctgtggggcctccctgaggcactttccatcactgtcctgtctgtcatcatggttttcacatttgcagccagatgctggggaagtgctcttgctccatgtttggaggaggaatacttcccatgttcacctacacactctgttatagcccagctcctaacagccctctctagcccctgccttgggcctctgggatgtcatctactgtaggcgtgtctgtcagttcccacagagaccaggagctcctgaaggctttgctggagtccaggggtcattagaaagcccaaggcctgctggacgtaaggatcagagttaaggctgtcatgaagtaatactcacagtgtgtagttaatagtgcacgaatggcaggtgggcggtgcctatgcctcccggtttaaggtagcagataataagaagaatggtgcttattgacctaaccaccccacatggtgattcttgcttgttccatgaccacatattgtctgcctcacactaactaagctcacaagagactgacttcagttgaaagcatgtcagcttattaatgagaaaccagagcctgtgttctcatgggtccctccaacgtccaaagagcaagaccatcgggtgatactgacatttgttttggatcccaggaggaggcttcttgactatcatttagaatccccttgcttcctgtcacccctcccctcagcccactttgcttactgttttccattccatttccattccatcactctcttctctgttcccatctccatgcttgccacctgtgctagcttctatcctacacatgcattgttagggtgaagctagaagctagactctatattcattggattagattttttttttattatggtagtggggattgaatcaagggcttctcttgtaagcactctaccattgagtgatacaccatttctagaaataattacttttaatctgggtggtgctaacagcccacaatcttatccctgccccctaccttttacttaaacttagagcattttccttcaatgttggacagacccaagttttcctgttctttcctgatattttatatttcctagttaatatgaatatatgtaattatacattacttgcaggatttaacaccattctccaaaaactcagccaagtttaatttttgaggcagggaattactttgtagcccaggatggcctcaaactcaagactgtcctgcttcagcttcttgaaggctgtaattgtacatacatgggtactaccaggtggagatttagttttctgcatgcatataagcacacagaagggggccagttaccatgctgtaccagtgaacaaagatatggacagatttatgagtgatggacagtcttgggagagaaatacagacagacagacagacacagagagagagagggagagggagagggagagggagagggagagggagagggagagagagagagagagagagagagagagagagagagagagagagaaggaaaaaaaggagaaggaagggaacggagggaggggcagcagccctgagacatacggcagctgggtgtacagagtgtgtacgctttggggtagtaaattattagatctccaaagtagatcgtcctggatcgcgtgccccagggtgtggcactgtggtcatctaaaggtgcatgtttatggcctcgtgggttgtctgaagctttgaggcccagccttcagctccaccagtgaggtcctggctgctcagccctccccagacgaatcctgtctttcaaatgagggccaaccagtgcgaacctcagcaacagtttctgtgtacaggcttcccgcaggatggctgtgccctcttcatttctaatcttggctcttcttgtagttccctgctcttttctgagatgacggtggtcagctgggtctcttttctggagtcttctttgggaatcacagatcctgtctttgaattattccagcatttttacttgcccatgtcatcattcctattaaaacctgtcccccactcattgccccgtggcctgcataaatgtagtagattgtcttactgttccgaatctctggtgtttttcactgtgtgagaatttctaggcagcctggaggacgtcctctctggctgtgtggcttgccatgcccatgggaggagagtggcaggagagtgtttttcctcagcaccaacactccctcccgggaggtgccaatggttctgccatgcttagatgttactgcatcatcagagatggggccctgctcccttggcctgggtcctggaatgaaggttgtgtgggaaagggcttcagccgtaacacacagcgggagagggaagtggggtttggttgaagtcactgaaatttgggattgttggttatgacagtatatcttagtgaactgactaatacatttaaaaatatttttgtttgcatacacacacacacacatcttccaatagtggttctatcagaatcatagagaatatttgattttgaatgctactattcaataaatgtaatatattttcattttaaaaatgactggtagcatttcacttttgcaaatcttgtgctttatttttgactttatatatatatatgtgtgtgtgtgtgtgtgtgtttgtgtgtgggtatgtgtatgtgtgcacttgtgcaacatggtatatatggggaattcagaagataacttgcagagtctgttctcttacattctgtgggtcccagagatcaaactcaggttgtcagggttggtggcaagccctataagcctttcagccaccccacaggccttcctctcatgttttacatgtgacactattttaggattggatggccctttgaaggtgagcaagtttttaaacacatagcctgtaggtgactgtgttcatttatctggttcctactgttccctcctgtgtttctgggggtttagtagtctcactggggtgcaaacctgactgtggtggggggacactccaaccaggggcctgttggaaggctgcctgtggccggcatggagcactgtccttctcaccagatcaggcgctgctgtgggggctgtttgcttcagtgggttgcagactgtcctaattggattatggggagaaagtccttggcacctctcccctgctctttatcttcctggggacaatccttttaggtgtctggagctgacactcatgtcactttcacactcagcccctgtcctggttccctctgggtccctcagctgtgccttgtgattggtgtcggtgcagcgtatacctggctgctttgtcctcccaatcctgccccacggtaccgctgtcctccttgaataccgatcccaatcagctgacatctgatgtgacaagtgagcaccttgccttctatggcttggctgtcttactgttatgcacctagtcgtagccacactgtgcgtcttctgtctcctattaagtttagaggtgaccggacccaagcctgtctctgcagcttctccttgagtctccttccctgttcttaggtctggctttccatctgtctctgttgggtgctgtgttgctcagtaaggcctcctgtaggcattattttggatactcagtcctgtgataatcatctatgcagtgggatcattattgatcaatgtcctctcccaaatcactcataacagacatttctttttatttatttattcactttacattgcagtcacagccccgcttcttctcattcttccctcctctcagtctcccccaacaaccccttcttctccttccccttctcttctgagaaggggggagactccccctggataccagtccaccctggaacatctgaagaactaggcacattctctctcagtgaggttggacaaggtcagttaggggaacaggatccataggcaggcaacagagtcagggacagccctctctgcagtgcttgaggacccacttgaagaccaagctgcaatctgctacgtgtgcgtgtgtgtcgggggggtaggtcagcccatcataacagcactttgtcagttcttagggaccatcctagcttggaccttgttattctgtttctggatccatccagttgtcctcacagccagctcacctcagatgggactgtgtccttcccttactggcatccagtctacatcagtgtatgaaaaattccattctgccggtggattaatcccttcccaaggccactgagaaccgtgagagggaaaggaactaactgaatagggaagctctgagagatgggcaggtgcagagagcaaaaccgtctctaggtctgaggaacagggctgccggtaaggcaggggttgagctgaggagaggatgttgcaggtagagaaggactgtctgatgggagctgtctttataggcagggaagcacgtagactagacagctcactaggttaggctgtgagtgcaatggatctgtaaaagtgccctctaatttgtgcagtgtgtgactctcacttattactgtcctaaatagcttcgtgtatcagatatctgttttgagtggatcggaaagagagcttctgttttcacttgtggatgctcctgttaacaggctaagctaagttagagtcatagtgtatggtgacatttacattgcctttgacaattaaatgcccctggaaactagctagttcatttctgaaggcagcggaagtcatgccctggccagcaatgcagccttggggtgacaagagctggaagaagctgcctgagccctaggggtgggagtggtgagtgggtgcccatagagccatctgtctgcttaggtctgttgtgggaagacacacggacaagactcagacacacctatggggctagatgggctgtgccagctgctgaagagatccacagtgtctgattctctcccacatttaaaacaaagaagggagttataatctgaatggccctgtcttctccagtagcccaactgcaggctgccactgactgtggggaggttgtgtgctggctgacctgcagccgctgcatagtcaggatggtgtgactctaaagggggtgaggtgaagcgagtgtgtatggggttggcctagggcaggtgaggcccagtgaatctgcacaggcaagtggacacagcctctctagctgtgtggtctgtgacacttgcccagagacttccagttggattcccataggaacaatgcatgatacaccctgagatctgcaggagagcctcagggcaggtggtctctgaggttcagggtgggaaacgtggtataagaatttgtggttgctggaggaggatagggtcctgaggcacgccagggtatgcagggcccggtgaggtatgggggagttcagccaacttagagagaataaaggcttccattccctagcagggatcctgccttcttcccttttgctcttggctgtaggcctggcctgttgtctatctgtgctacagtgtggatagtgtctgagaagcctaagggatccccaggcctgattcaggtgtatatgtgtgtgtgtgtgtgtgtgtgtgtgtgtgtgtgtgtgtgtgtatgtgtgtttttcttggtcttagaggaaggagagttagaggtgtgcttgggaaggtagcccatagctctgtgtagggaagagctttgcacaatagaacacaggctgtaaataatgcatctgccacagaactgtgccccaggaagcccaacttccctgcacacactcaggagcacatttcaatgcagaagccacaggaagagcgtcctcatctctgtcttttatcatcagtttccaatcaagaatcacagcagcccatgtcctggggctccagcctgctgcctgtggnnnnnnnnnnnnnnnnnnnntgtcctggggctccagcctgctgcctgtggggaacagagttctccagagagtgtgctgccgagctgagccatgagatacagtggctctgcatccagtctttggagctggccacatgcagatgagcagcttttcttaggggaaaagacagagctgtcatctgggctagtctgatgtcccttgtttctatagctacggtaaatgtaattaccaaagagtaaccctttgcgggtttcactgtaacctcagatagctaatgacatttactgggtttctagcaatcggggacaaaatgctcattttgaatctaacacgagtaatgccattttccatcttagttaagtactttgtgtcataaaagagttatctgtacagcgcccttggttctgtcagtaaacatattacaaatgttatcaccacttattttctggatgaaagatatggtgaagccccaaagacatggctcctcctttgcatctatgactttgcttggagactcagaaaatccagcatgaaatcctcacagaaggaatttagaccatgcaccggtatcacacatgcaccagggaccctggaggtagtaacattcttagggaatacaagcgaggtaaatgcattcttcctccacgacaccaccacggacggcattaggagatgtcatttgcctgctgacaaaggtgaggggtgctgagtgtctttggtgtagaaaaatggtcgtcactactacttgttagaggaagataggtttcctctgttcctgggcatatggaatttgcacactagagtagagtttgtgtcagaccacatattcattcacgtgctttaaggatccatctgtacagatttgtaaataaccatcatggtgcggcatgatgggtgcgttcatagagggacataccaaacctgctggagtcgggaaagcagtgtggggcatgaactgcctaggggagtctcagaaggcccctgggattgtaaggtttggtcagcatctgagacagtagttctctacctctgggtttgtgattcctttgggggttgaacaaccctttcacagggcttgcctaagaccataggaaaacacagatttacattaagattcacaacactagcaaaattacatttatgaagtcgcaatgaaaataattttatgattgggattcattgcaacgtgaggaactgtattaaagggtcatagttaggcaggtcgagaaccactgatctaagaggatctgagtgacttgaacatcctggggctgaagggagaggtgcagagtggttgtgaacttaaagttcttctagagccaaatcttaagtctcagttaggctagtggtctgtggttgccctgcttgctttagaggtcccaggagcagaagagtcccagcaggcctggcgttcagctggagatacatccagcttagactttgctgcttagtactagatttcaggtacggtcagagccttgtataaaatgaggacaggcagatagacagacatgctccctcaagggacaataagaacacaatgcgtcacaatgcaggtgccttgctcagcacatgtttcgctgtttctggtgaattccttgagtggccacgaaagcatccaggctctggagggtttgttttggcctagccagtgctgtgacatctgctaatagttgagcaacaaattctaaagtgcaagggagcacagaggtccacacacctggcaccaggattctcacagctcaaaacacttctgtctggatcagagttgggcactgatggggattttctgggatgacctgagccaagggctgtttgggaagttcagtaaatgctctgtaaactgcatgtctttgtgaatgaggactctgtgcccaggcagccctcagccttcttcatggggtaaggtggaggtggcaaaggtgactggatgctggcaggaactccttagcagatggagccactgtctatggcaactgctctctgtccaggcatgccttgcgagttattggatgcatttaatcaacaaggacaggtattctctatagtctactggtgagtggttccctttgttaggtccccaggcacaacaattcttttgtttggggttcagaaacgaggtctagattgaagctagatgcttgagaccctagagcccctgatcaagggaagggagccagctctgtctaggagcttccccatcaattttaactttttcctctgccaagttcaggctgacttggtttgtgttttaagtgcccagtcttgttggggcttccagagagacatgtgccgatttcttatcaatcaaccttggaagatgtggggagggtttgattatcagcaccacattccaaacctgtcccctggagaccaatgaatgtcacgaccaactactacttgcgatacagaaggcctggtattattgggatcacgctggtccttttagtttgcttgggctgggctttgtgtgagagccactgtggcccatgcgtctctagcttaacagcctccctgaggccttgggagaccccacctgtgccactctttcttctgccttgtgccacttgttcccatactctctaatggcctttccctctcaacctcttactcagcacttcccagcgttgtttcgaggtaggccaaaccctagagaggctcttagggccaagtttgccattcatggcttttttttattagaagccacagaagactctctccttgccctgctttccttggagatagtgggaaactaaacttagcatttttaaggtattctgtttttctctttggtgaagagattgaaaggttatccatctgtttacctatcatccatatcccatcaatccatccattcagtcgtacatgtacctacttaattattcctttacccatacactcaaccatcctatggccaattcattgtcatctgtccatccatctgcctttcttcccatcttcacatgtttctttctacccatttatgatgtatcacctatccacctactcttctacctgtctgtccatccctctgaccattaatccacctaatcaagtatttggtgattcctgcagtattctaggaatagcaccagataccagagatctgaaaaatagatgagatccatctttagttgcataggtgactttagaggaggccagccaatctatcacagtaattgttactgaaggtggtgtgatctggcatggggaaagggacaggtgggagctagaactggtaggtggacagcggggtatggttttgaagaggttgttgcagccaataacaccaggcctggaataaaatgctcactgtatgttattggacaatgtagtattcttatatagaggtagagctgggtcctgagcagtggggaaggggtctaggaaattcagcagctggagtgaggagatgctagactgacagcagaggtgggtgctggtggaggagatggatcagtgacctcatgtagctgagaaaatccttgctcttcttttggggtcatactcctctgtactgtgagctggtgtgccaggtttatggcggctaaaagccagctgaagtcattgtcaggagctcctcttgcctgtctttcctgggctggacttatctcaggcactagacacactaccactagagagcacccacgacagggcaaggtgaggtctccgctacactaggcccggggagcctaggaggcctgtgacttttcaggtccttgtggttatggaggttagtggggcagatcatacttatcccctaggctgctcccaagccctggctagagaggtcctgggatagtgcagactctgactcttagcatctagaggaattatcttttctgccttatggatcccaagaaaggcagagctgagaagtgtctgcgctccagtgtttctccctggttctcacttgtctcagcccctggaacactggccctcttttttttttttttttttcttttggtctaccttcccctccatgttgtagtgatgccttggctgttctgcgaggacaattaatggatgctccaattcttcctacaataatcttcaataatgaaattagaatggggaccatgcctagttcattggccttctcctgccccccccagggggtgccttgcccctacagggacctttcccagtgtcttgggagaaagagggaaggacatgtgtatagtagctgcttacccatgttacttcaaggaccaagagcaatacctacccatcccttgggtcagtaccattgggggatggatcgtttaggctgaggcttttctgttttgcagaggccacctaagggaaggggcatcaagcacaggctaattaggtatgatagagtaaagctaatgacagtgatgattgtggtgagaataatgagccttggcaacagctgacgttctgagacgagaatgttcctcgcctacctgcttgggtagggcagatgctgggacagccacgagtggcattctcactttcccagagccctggatactaggttgtctctggccctccccttacccctaagggttttggtaccagcttgggttgcacacaggagaagagttgccagttagtagagatggacacaggcctgacaggaaagaaaaccctgggctctgtgccagatcaggtttctaatgccttaggtgggaaaggaaaaagtgaaaaccctgaatcaacaagaggcaggggtctaattactgtgggtaacaccaatgttctgattttgggccctggtgctccctttaatttggggtctttaaatatttacctgcaatggaggggaagaaaatcttttgggctccaagactatctggcagcaatgtgctgagaaattcattaagccacagttaattaggggatgaaagatacatatatagctcattagttcaacccacataatttacatctctgaggatacttgagtactatctcagctccagctctccaaaaaaaccctctcgtgtctttaaatgcagcatgtcacctgactgcctctggggcctatgggacaagagaggtggctggtctgtcatccctgtgtctgtccagggcaaaggggattagggcctctcagcctgtcctgtttcctgctagagctgctggtggttggattggctgtgctcctgctgctgggcatgattagggagggaggaagcagcccccccccttgctgctgcatcgcttagcataatagtgcggtgtctgagcaggctttaaactctatccaatccggttccttgactgaggacattagccttgatttaatctgtagcacacagagaaatcatgactgaaaagtcagatttatgtgtctcttaccatacaagagttcctattctgggcctctgaggtggggaagtgggagacttggctttgccaagcacagcccaggaccctcagctatgcttcctccacacaccaccccaccaagttgacttcactgatcactgtgtgagtgtaattccaggccctgctctcagccctcattcagcttggaaagagagatgggagtaggtgtgtgtactcctgtgcacagatgtatgaggatatgtgcacaagcgtgtatgtgtacaggtgtaataaataggcatgcctctccttatctgtattcaggtatgcatagaaggatggcagggagcctcgtggaaagttgcattaaatatcccaaagagtcagagtggcctttctcagtccacacctgtccctttttttgtactaggggctgcagcggacaggacagaaggtgacccagatgcagctggcaggtgtgaatcccacctctgctgataaatagttgggcatttgtggtgtcctcacctgaagcagcaacagtagccctggctcagaggccctgtttgagagagaggagagatggacttacttcctcttagggctcgtggagagcaggctgctcttcgttgctatctttaccctgctacttctttgagcctcattttccccatatgttaactgaagttaacgttgctgagctcacgggtagtagctggggctgggcgcctgttggtagctggcacaagggatgttgactgtggagctttgtgctaggaaggtgaatagggaaggtgagcaagcctgcggtgttgggaccctcaggtgtggctgtggtggaagtgaaggataactgcacagaggttctagctgaggactcctgaccccatccaggcctcctcccgtagagacctgcctggtcagatgacgctgcttataattaccatgtgtcacttacaaataaaaagatgtcaataaagtgtttctgtttttaaataatgaaggccccatattatgctgagaggagcttggcggtggggcatggtggaacgtggaggatggtccccttgcctgggtcaggttctttgatatggtggcagcagtggtagcaagaaagaatggactgcacagtgagtcaaggttgcttgcactgtttgctggccactgtttttgcacccatgtcttcaccccagccctggtaagtgagtgctattacacctgattacagggaactcaagccaaacccaggcagggctgggagaggggccttgggtaaggggttggtggagagacggtgtctatcagtgcttagcaacagatgtatcccgccccacccccaacacttagtactgtgactgtgggcaaattacctttgtgagcctgagtgtaaccacgcaggctgttgcttggtagggatggagtgaattcttagggaagaggctagactggtgttggagtactttgattattgggaagtgttctagttagggctactattgctgtgacaaaagcaacgtggggacgatgggtttgtttgacttatgcttccacatcactgttggtccttaaaggaagtcaggacaggaacctggaggcaggagctgtcacagagaccacagggtgctgtttactggttggctcagcttgttctcttatagaacccagggccagcagcccagggatggccccacctacaatgtcctgggcccttccataccaatcactaattagggaaatgccctataggcttatctacagcctgatcttatagaggcattttctcaattgaggctccctcctctccaatgcctatagcttgtgtcaggttgacataaaactggccagcacaggaagggtggggagaggaggctggtgctggtgtctgggaactggcatatatagatatttcaggtctgccgtttcccctgcacatggcttcctgagctgggtttttgctttgtcagctgcattataattgtcagcttgcaggagccctctaggagggcctgagcaggacaaggcttcccttggggcacccctcctccagtaggtatcagtacagatctctttttcctcctggatctcctgcccaaggtcccccgtggtttaggtgatgaagcactctccctgcccccaccctcagccccatgaccttctcagcattatggggggacttttttttttaactagacaggtgcttgaattatttgttaatgcattttcatttttaattgacacatattaattgtacatacttatgggtatatgtacagtctgctttattacactatgacaagtagctgagacaaacaacttgaagggaggatctgtttatttagcttatcctttgctttcctgtgtgttgtaaggcacagcatcatggtgatgggtgggtatggaagggctattcacctcatagtgcacagaagaacagagagacaggggaggacacaggacaaggtacatccctcaaccgcataccctagtggcctctgcctctaaggaggcctcaccttctaactttgctattacctctcaataatgacttcagattaggagttcatgaatggactaatccattcatgaagtcagagccttcaggtccagccacctcccaagagcccatgagctggcaaccaaccatggctctgtggggaatagctcacaggtaaatcataataacgagggacactgtaacgtttctacacaggaaggcaatgtgtcgtggtcactagggtaattggcacgcacaacaacttcaagtactttttttgggggtggggggtggtttcgagacagggtttctctgtgtagccctggctgtcctggaactcactttgtcgaccaggctgacctcaaactcagaaatccgcctgcctctgcttcgtgagtgctgggattaaaggcgtgcaccaccacgcccagctcacttcaagtatttaacatttccatataaggggcattcattttttccccagctagctatgccaactgtagttatcaaactgggccattcatgaaaaacgttgcgtgatccaaagtgcaattcctttggattatcattgtcctcttgtccccagatgtttgcatgaagtgacatttggcctggagcttgactctgttctggacttggtgaatccagcctagccttcagaaggcttcattcacggtttactagacccctgcccccagggagacttaccgtttacatcagactctgccaggccctggtactggactgatttggtaggtgctcagtgagaatatatgtcacctcatgggggtggggactgtccaggcattcagaacgagtgtcggcaggcatggattcctcttcagaacctactaaatccagtaaaccagcttgggggccagccacctgccttcaagctcctgctggccaaggtctgctggaggcagccgctgggcgtttgtggcagtcggacttagacaggagcgtgtacctgagcatttaggagtaatgaattgtactgtggcactgagactcattcccattatttgctgatgagaaaattaaagatctattgatattctcataattaattggacagaaatgtggaaataactatgcacactctgtctgggatgaagtcagtgatactaactccttccatggtcatatgagagggaggaaagtcctgtttgagggaactacgctggccaagacctggaggttctagttgtctgttggggtataggctgatggtgctggtctacccggactgtgatggggtatagaccgatggtgctggtctatccagactgtgataggatataggctgatggtgctggtctacccggactgtgatggggtatagactgatggtgctggtctatccggactgttgctagagggctgtgcttgtgtctaggctgtgggaggcatttaaggacgtcttttgcttaggctgctagggacagaaagggtcctgttgatcagggtcagacagagggcagaactttattacagaagggctgggatggaggctagacttagcaatgggaacaaagctccacaacagggaacacaacccagggagaggcaaatggagtagctgggtaagatttaggtatagtgtgcttagagactaggcaaaggtctcaacctgtgggtcatgacccctttggcaaacttttatctccaaaaatagttatgtcatgattcacggaaatattttagcagtagcaaaattacaattatgaagtagcaatgaaaataactttatggttgggggtcaccacagcataaggaactgtattaaagggtcacagcgttagggagctcgagaaccactgaggtagaggatgctgggaatccagagtgaagcatgagggaggtgtggttgatggctcatcttgtgggctcagtgtcaggccctgtgtaccttgctgaagatagagatggggccttctgacagctcctgactcagtctgctaagccatgtttcaaggtacccctggaaagaatggccgactgtttttcttgcagagtgcagctttgcaccgatccctcctgtcactgtcaggcgtcctggatgctagtctaggcacccatcctgttgccttctgaggacagggagggatatagcaggtctcaggtgagacatcagttggcagcaatcttgatgctccctctgaacagtgcattcctgtatttaccctggttagctgaagttgctgtgtgtctgcagttgcttcattgcatgccaatgggtagggaacccaaccccacatgccctatagctgacttgagaacacttacttcctcagacactgtggccactgtggggacttttcaactcggtggcacattctacagaggggtagtggcttttcctcctccgcttttctgtcctcacaagggctgatcttcctgccgagggaggcaggccccagggcagtctttccttgtagcttatacacttggcccaaggtcttgctgggagtctgttttctacctcattgccctgcctctgcctccgtggcctctttgttttcctccctgttctaggtacctgtgtctcttggggcatcagtagggcattggtacaagggaggaggcactccatttttaaaccacagataaccttggggccttggtgtacgtagcacagcctcaggtaaggttccagcttgtggaatattcatgtcccattggtgtaatgtgctggatggggtgagatgcgcaggttgtaggacctggacccaccagtgggtttcaagcacactaattctgtctaagccccactttccttatgtgtgtgtaggatcattcattccccaaggattctatagccaaccaccacagattgggtgctaagcagcatttagctcctcctcagcctacgggaaggcagtcctcgagccaggcttctctttggtgactgttcttggctgtagatgctatcttatcaccaagttttcactgggtcagccagctctctgtatctgtgcccaaataatgatgccacccatcttggattaggcccccacattgcttcatttttacctggtcagccctattaaccccacagtctcattctgagctactgggtgctagcacttcaaaaggcacttgctgggagagcgtgcacttcatcccttaacaggagataattttgtttcatcactgcattctagggaggggatggcactgtgtctgtgacacagcctctggcccagaagtttccacagctggtgggctctaaggcaaggacaggcagagaccagtgccatcttggcattacgtggcattaacattcttcatgaatatccatgctttatcatctcagtgggtgtgtcccagcagtgttggccttgcctggcctccagagcaccaacctgctaccccttcctcgaccttgagagctgggttaggtgatcacatttccctggtcttcctaaatgtgtcccacactgggtctctgtttgcactcctgctatctctaccagggcttctgttgtcttcatgctgcctcctctgtgtcccctctgggcattcactctaccctcacactcttctgagcaaggcgcagggtacactggaatgactgaaggccactttggcataggccctcctctgtaccaggcctgcactggtcttctagttaaaggcaaaaatcacaagtcctgacttctagcgtcgaggtgggatggacatacagtggctgtggtcacattttaggaaggcctatgtcacctgtctcatgccaatgacgtcatagtcctcatccctgctcgtcaccctaaggtgttaggatgagctccactagtaagtgaagaaatcctgaggcctaacacagtggttctccaccagtgggtccactgaccctctcacaggggtcccctgagaccatcagaaaacacaggtacttacattataattcataacagcagcaaaattagagttacaaagtaacaagaaaaacaattttatagtggggatcatcacaactgtattaaaggctcacagcattgagaaggttaagaccctttggcttagagaaaatatttccaagtcatatgtatgataatggaattatatctggagcatatttaaatcttacaactcaataataaagcaaactaccccattcaaaatggacgaaatattcaaataggtccttctctgtcacttctctgtgtacatctatctcaaacaaatacatgagaagctaagcattatggatgtgcaagtcagctcacgtgcctgcatacctgttggcatagaggccatagaaacccagtaagacctgttcagaggatatgaggccaagggaatccattcacttctggtgagagtgtgaaatggtacaggttaggtgtgggaaagagcttgattgctccttagataagcagatgctttaaccgaattgctctgcatgtccgctgctaggaatctgtgtgtgagaggtggagacgtgcgcagacttgcctatggatactcaaggtagcatatgacaagcccaacctgacttcatccaatgtccgtaagaggtgaacagataaacacggttccgtgtctcagtcagtgggatactactcaaaactaaacagaaggaagcacatggccttaacacagggtgaaccccagaaacattctacatgaaagaagccagacacaaaggattacatagcattttattgcatttatgtgagaatttccagaaaagggcaaaactatagagacagaaagcagattagcggttgcctggagctggagatagaagcggggactgatgccagagtgggggatggaatgaatctgaaactggatggtgctgatatttacatgtctgtgtacacaggctgcgtgcgtgaatgtcacagtatatcatttagacttcaataaatctatcgtctcacaaaaaaactccactggaagccgtagctggtaagtggctatggtagaattcaaaccaaggacagttttcttgagagcaccatgcttctggtctaggctgcaaggtagaaaccctgcaggcagtgttgggcagaagttcagagacagcttgtggcaaggtgtcagtcacatgagcgatcttccacttgacttcgaaggtggagggcatagaagttggtgctgggccttttaggagaggggatatttatttatatgtgagatacaggtgaggcagggaccatgagggaactggcgagagtgatgggagttgggagacaggaaggctgagcgttctggctcctcccttcactctcacattctagaacttctggggggaaaaaaatccacctgcatgaatgtgcccagaactctgtctgttctgccatgtccctcttcaaagctccttcactattgattcttctggcagttctaccatcaaggcccctgcaggtagagcattgcatctcagtgaactgcctctgggttcattaaggcaggaggctccctgggtctccagaatgcttgttgtatggtgctgattggccatcagctggtgcagccagggatgcggctttctcatcttctcattcacaccattagcattccaaagtggaaaacaagcccagtgttggctgcctaaatatttatggaatgttgctggggtcagaggaccaggacagcaaattaaattaaagatttacactgtagcaccaacccaagaaagtcttgaaccttggcttggttttgtttgaagaaagaattttcttttacagtccaggaaacttagtttgtgtaaatttctgaagctaaatgcatgaaattttaatctattgcttcacaccgtgtcttcctaatgtgctggtttctaaggagcccagagtgagggtctgctgcattttcatgcacccggatgcacactttgggattttgggaaaactgatgcctttgtttgactctcagtcttatggctccactgggggagggggcccagtgtgaaatgtggggagctgtgttctctgggtgttagtagggatcaggaacaggggtggctgataagtcagctggtgttgacacaatgtcttggttagggttttactgctgtaaacagacaccatgacaaaggcaactctttttttgtttgtttgtttgttttttaagcaaaggcaactcttagaaggacaacatttaattggggctggcttacagttcacagattcagtccattaacatcaaggttgcgttgcatctaggcaggcatggtgcaggaggagctgagagttctacattttcatctgaaaactactagcagaatactggcttccaggcagccaggatgagggtcttaaagtccacacccacagtgacacatctactccagcaaggccacacctactccaacagggctacatcttctaatagttcaccccctggcccgagcatatacaaactatcacacacaaccatcatttcgtactgaggagggaaatgggtggggaatgggcagaaccttgtttctgagacagtcaaagtctggcaagaaacagactgaattgaaaaaaaaaaaaaaaccatgaaggacaaggtcaaggaaaccaactgagacaggcaggcagaggggagttttgggcttcagctaagaagctgtccccattcctggtcctgaagaggcaaagggaacagatatacaacaatcagttttgccgtcctagccaggaatgggggcagaaggggtccctcaggggttctttttccaccgtcccctgtcctgtgggaagttctcattggctgcaggactggaggacaagtagatgttggtgatgtcatccatagctgctagtcttccagagcactgggagtggatagaggtagagggcccaaaacacagatgctaagccctgggtctgtgatggggtctgtgtgctgcatgagaaaaagcaattcaggggagaatgagccaagaaggaagtatcttgtaaatgtagcctgtcttggtctggggacgtgaaacatgaacttgttccctctggaggtcagaggagagacagcttctatatacctaaccccagggggcatcaattgtgaactgggagtacctctaaagcaatgtagcatccctcggtgtgtgtgtgtgtgtgtgtgtgtgtgtgtgtgtggtgcaggaacgggtgggtacatggagaagaccacttgccaaggcagtccaagagggacactgacagatcctgttaccgtggcagggaatggcatacacactgccacatgactgtgggcatttgattgatgccacaaaacaggtgcctccagctatagaacccgactcctaacttcctgtccatctcctcaggagttaacagtgagagccttactgatctgggatgaggctgtcactcagaacacagcttcctctggaggtgtccagcactgttaaagagtcagcccaatacttcagccgccgccgccgcaggtcctctgacttcctcttcctccacgtgaccagaactacctggtgatgagctggctgaagtgctcctctggttatcttgagaaattatcccgaagggttcttgggagtgaagaattttagatgagggtagttatcagggccgaacatcaataataaatgctgcatgatttttttattagaggagccctatcagcgtggccgcttcaactttttaactctctggaaagcttaaagttgtggtgcattctgtgtaggaaagtgccagctaatcaaatcccattcatatgcaaaacacccgctttgccgagttcatcaaaattcagtctttctttaaaaaaaaaatatttatagaccttccctccctgcaaaagactgtgaagaagatgggtagtaggaaatacaaattgttaatactctggaaaggaagccttgctctgagccctgctaaagcatcccctattctttgagaaaaatttaagtgggaatttgtactctcgtttcccacttccctctgctacatcctctccctggttcagtgctgtctcagtcttccctttttgcagttggggatggtttgttctctgtgatggaatggtctctgggtgggcaggtgacatcatgggagtctttgctttaacttggctccattatagagtctggaaagctgaggctcagagatatactggaaactgcccggtggagacagctccgagtgtcacatccttcgggagcagcagcctatgggggcagtgcttgtcagatctctggaccactgtctcttttttcagtggttctcagccttcctaacgctgcaaccctttaatatggttcctcatgttgtggaggcccacaactagaaaattcttttccttgctacttcttatttatgctactgttatggatcttaatgtaggtaactgtgttttctgatggtcttaggtgactcctgtcaaagcgttgttctacctccaaggggattgagaaccattgctgaaggggcttaaaaatagcgttgcactccttgctggctcccgtggtggcggatactctttggagatactttgtgtaggttattcttgctatttgtcacgtgggactatgccgtgaccctagttgtgggcatcatgcaaagctttggatatggcatccttggacttgtgccttggacttggaaggcactcagggtaagagaatgattgacaggaagccccctgggtctttctaggcttatcagtggctcagaacacaagagtcagctggagttgtgttcctgcgagtgcaggggcagttaaagccagagtcactgtctgaggtacgggataactatttcctgcttctgcttctcaggcataggctctgttgccgtgtgtgtgtgtgtgtgtgtgtgtgtgcgtgtgtgtgtgtgtgagtgtgtgtgtgtgtgtgcgcgcgtgtgtgtgtgagatgtccctgcctccctaggaggcactctcttcagatttatgggcaaattatccaggactccagcaaaccatccattttcaattggatttttgaaacagttttctgacatgtgtctcctgccatttgcaactgcatcacaggctcctggaagcctggttggagaggtaacggttcattcctggccattaccctggatgtgaagggttcgtgggagccacatttgtatttaaagactttggaaagtgcctagcgctgaaagctaggctcccagtaaagtctcaggaggctgtgataaagccagtgcagcaggttgtagggaatgaactcagggctcagacctggccctcctaaagtagctcactggccagagcaagaggtagtgctgggaacacttagaagagacctgggagaaatcagggagggctcctggaggaggtgagtgacagttgaacaaactcctgggttctgagtagccatttatttctagtcaggggagttctgcagatagagagatgggaagtacaaaggtgcatagtatggaagcagtggttttattcagcgggccctgggggtggggtggggggacagtgaggaactcagggtggagatggccctgggcttggtattgatgatacccattccttgttctgtgtggtggtgcagtggcttctagggctgggagtgatgaggttcctagctcccaagggaggcaagtgtgagtctccctggggattcacacacacgtccttacctgtgaaatagaggtacgaataacaactctgtcctgtggttgcatggccactgacaggtagtcactgtgctagcttcctgcccttctcacactctagctctgcatgaggtagggtggactctaggatggggcagggctgggagggcgaggtccaaggtggacagcagccaggaggcgaggaaggctaggccgggtttgacagcatgctctgagttgtaactcattgtaaccgagcggacggccaggcgtggaggaattggtcccaggagtgtggaacaccaggacagtgttactgtctgttatttgttctgtcaataaaaatggaaggaagctttcctgtgcgagtttcctggcctgacaggctctggcatcctgaggtgagccaggcagacgtggccatgttattgagagggcactctgagcacaggacatcttagagtggacagcccagtcagggtcagtgctggtgccccacagaagggtgtagacgacttgatcggaggggctgtggagaaggctgtagcaggtgcagggcctgtgtgggagggcatgcctagcctgtgttccctttgcctggtcatgcttaggacaccatgccaccttgtgctgcccaccacacagctagtggagggtacaggttttgggggaggggaaggtgcttactcagagggagtagctgaggttagagagtagctcagagtttcctaggagtccctatggtaaagagaacacaagagaatgcagtggcccagcagctacaggccagtgtctggtattcgtgttgataaacctgtgctgtagccctaggcagttacaaacctgcttaagaatgaggctccctggctgggaatgacaggacctgctccttatggacacgcctccggagccactctgcgtccttagagtggctgaagcaaaagggagatgctctgagtgaggcccaattctcagaggcttgtgacattaactcagggggcactgtgcatccctggggggatatttcaagcttgttttctggtgaggaaattagacactgtgaggttactatctccctcgaggtcacacagctagcaaaaaaagcagtcattgacattgggttggacagcctggctcctgggtcctaactctggttaggaagtgcagggactagtcatactacctcaagctcaggggacactggtagtgtgtctcccagaagcggagaatattagagataatgtgggattgcatcttagacttttaatcaggttctgttgggcagagagctctgttatctccacagggcacaccagtcacacctccaccactgggcatggcaaccgattctatattgtcacctttgttcaggccctctctgggcctccctttctggtgtagtggttggaatgccattgcttttgtttgtttgtttgtttgttttgtttttttttttttttggtcactgaagcgaccacccatacagatacaagaagtccttaaagctctctcctctaggtgcagctctttaggacaatgaattaatagtcaggggagtcccaggagagtggtgggaccagaagagcacccacatgtctattcccagggcatgtgtggtcttctggtgcgttcagtctctgccttgggctgcagcttctggggatactgttgtcgctgttggaattggggacccaggaggtgactttgctgctggtgctggctgagtaggcccgtctcctctcatccctcatttggggcggacacctggctgctctaggagtcctagtcggatgtcaggtggaattaaccggcagcagggccaggtgggtgctgattgaggctgattgctgggaggcagcagcttcaggctacaccaggctatttccagctgctccaattgtagccaagaggctcaatccctctaagtgcctttgtgctctgatgcctggagagatggcggggacgaaggccagagcaaggtcagacttcctctgattctttacatttccaagtccttccatttagccacccatacattcacccagattccccgcccccattcatctgcttacctgtctatctacccacctgctaatttacccatacacctacccatccatccattcccctcacctgccttctcctccacccttcctactctaatactatacacatagtctacacttagcacacagcacaaagtacataaatacaggtatagaacattcatgtatatgtgtatatgtatatatccacccattcccatttacgtatttgtctataacccacacccatccatccaactgtccatctttccatctactatctatccaccatccattcacctactattatctattgcctatcagtatagtctatccacacatctcaacttcctgtctaccacccatccaccatccatcaccgtcatcaccatcatatatccacctaccatgcatcaccaatccacccttctatctattgattcatcatccatccatccaaccatcattcatctattcattcattattcgctcattcattcaccatctacctaacattcatctatgccctacccatcatccatccattcacacaatgtctatttgttcatctatcattcatttattccctatctagccatctacttattacccatacccatctatccatttattcactcatccaaccctctacttaacatcatctacatctagcatccattcattcattctccacatatttatccactcaccacctatccaccaatccattatccacccatcatccatccatccactacccactcatccaccattcatctgttcactaacctatcgatgatccatcatctatcacctatttatacattcattcattttctacccatccatccatccatccatccatccattcacctcccatccagtcctctacccatccacctagtcatttgtccttcatccgtatatccgtcagttctcccacctatccttctttggtcattcttcacccccaccttagtttttacttctgtactagactccatgctgttaccaagatccaggcccagaaaaggctgacctaggttatccagggcctcagtttagtagcgaggccaatgcacagagatcttgtgatggatcggaggatagtcactgaagaagtacttagcttaccctggggccacactccagctgggacttgtggatcaggaagagaattcacaggtaggagttaagcttggtgtattttaagaggaatgccagcagcggtcaggggacagagggaaccttcagtggtggggaggcctgtgggacaaggagggggtcagtatggacaagggttaggaagaccctggagagtcaggtaatgctgtgctggggacagagaatgcttgagggtcagaagcaagggagagctgtagaaagattgttccaggaagaggtgtgccaaggagtgaggctggatacagggagaatcaaggagcacaagatcctgtttctggatcctgtctgcttcactgtggggtccgtagcttttgatactgttgacacagttctgccagagtgtatgagctgttacctcttaatgctgtgcccaggcttcccctctgtccaacccctttgaatgtatgtggggctgttgctagctggtcctactttctaacttatgtcagcacttcctctagcacccctacttagtgggagctttatccaggcgtgggggcagctgaaggaagtatgccatagggacaccccttcttagactgattttatggggctccactgatattgctcaggtggttccagctctggataatgcagagaatcaactacatgatgggaagcttgcactctgtgccaaggctcagggatggcaaggctagaatctggcgtctctgctgcatctctgacttttggcagtgcttcctcattggtgcacaaattggtcaagctttcgggggtgggggtgggggtgggggctgcctctgctgaagggctgcccagcctcggtctgctgagtctgttcctgagctactgctgaaggagggtgagaagactttggtggacttcgctcctgtctagagaggttcaattgctgcaaatacctcacttttttgagaagcacagaaagtatgagggtggtgtgtgctaggtgggctcttcacctcaacagcatgtatcagctcagaaaggtagctttgcctagaaataagtcctgtaagtgcatacaggggtcgtgtgtggtatgcatggtatgcctagtagtcagggatgtgtggaaaagaagcccggtaggctcccatggggacagagaggccccctttcttggtgtctgggtctgagggtatatgggaatgccccttccctttcatgtttacagtctccttgctcctcaggtcttggtatcatgtgctcccagccctcctgtgctctgcagggtctgtgtacaagtaccagatttagtagacaaattgggtctgtggaagccacaacttcaattagtgatatgtggggagcagctcctagctctagaagggatcaggggtcaggaatctgtagcatacttcatctttgttggggggcagaactctccatctcaacctgcctcctcaccctcttcctgtctttctctctctccctctatcaggcatacacacacacacacacacacacacacacacgcacgcacgcacgcacgcacgcacgcacgcacgcacgcactcgcgcagtttacagagtaactatgttaacttactggaggcatttcagctctgggtcatgaggaatgttttgtcagcaaatactgaataacaactttcatgtaagagccattttggaacttcatgagggtctgtcactctgagaggaaggaaatagacttttagtggatgtttctgcttttctccataactcagatgcgtcagccttcttggttcccatttatggcagggagcctagatgccagcacctcttcctgtggtgctggaccctgtacccccagatagcttttagctagccttccgtgcagaaatctgtgcttctaggagagagaaaattgcagggtgtgatatagagtcctcactgaatacaattatgcttaaacactataaatattcataattctcagccatgagtgctgctttcctgagtgttatatcctacttttaaaaaccactcaagaagtcaaccatttaaggcaaaggaagtgctgagcatggtctgggcggcaccgctggagaaatgcaggtagatggagttacttggatcccacttgattcagccatctgtaagtcacccagtcgtctcgttcccgtctagtagaccgttggaacggactctcattttcctctgatccttcccctgtcttcacactgggttctcgagctagactggtcctgcccacctgggcggtaactgcagcattgatttcatcacttccttcagtagacattccctggatcctggatacccatactctggggatcttgaagtgacttcagtactgtctcttgacttccagtggttcatagtggtagacagtgtgggtaataacagtgaaggttacaggctgaggtaaagctttgtgtgtgtttggaatagaaaggtcccaggaacctctctggaggagaggacacttgaactgagtttagaaggaagaggaagaggaaaagggaaacaggaagccatgacttgggtgttggtatgccaatggcagatctcatcatgatggtttgctatctagatggctgggtggaaggagttttacactagggactgttgtctcctcaggtgggggtcagggtgctgaggatgaatggagatctacatagagagagtgcattatctttgagagtaataatgggctgggtctgctttggggttctaggcacatctctcttcccagtaagcacatgagagcaagacaactttctaaaaaggcatccaggaaagaggtcagtaatgtcctgcttgataagttttttgctgggtaggtcctaacacttcggcccattctgacacccattagcatcagtgaatactgatgcatcatggataaatgcagaacagatgtgattatgatgggagtgtgagggtgggactagagagggtaggattctgtgagtcctaaggtgataggaacggcataaaactagagttcattctgagggagcacgtgcctggaacaagaacaggcagagttacttgcttttgggtgacttggaaaatctggtcatcatttgttggcgcttggtctttgcttgatgattcttgaccttcagctccttcttagtcaccacctgctggtctgtagtctccacctgctggtccctggtcttcacctgttagtttttggtcttcttgtaggtctctgctggttcatggtctttgctttctggtctttgatcttcacctgctcatctgtggtctccatttccttgtttccagccacttggatgtccctggtcttaacctcctggttgctagtctttacccactagtgtttcatcttcacctattggctgctgatctctggttttcaccaatgcctcttgggagagtgggaagtcaagtgtttgtggagttggattgacttgggttgaactcagttttcattgtgttcaagtgtgaccttgagcaagtgaccttccttcacttagagtcttcatcggatcgtggagccatgatgtaatccttctttcagagttgccaggtggatcaaagaggaaaggtaggaggttgcatggtgctgggaagttttccaaatacgttaggtccatctctcggcctgggttgctcaccatatcactctgttcttgcacacgtgtcaccgattggagaacagtcttaagtctggccaagagttgtccacttgtttggaatgtgggatggggtgcacctgcctaagggtgaagctaaactgcttcctatggtggttgtggccagggaaacagggcagaggtaggttagagttctagcctgtatctccagaacaagtccccgcatcccaacaagttctgttggctggggtgactagtatagcttctgtaccccatgggacctcttccatgtaaagtagctccgtgtgcatttgcagaacatgtttgtgtaggtggtgtacacttggagagattttggagggctgcatttcccattttgcttgtgctatgggcctcgacatctgcttttctaccgttgtccatttgcctctgcccagggaaggcactggcatcaagaaggggttgcttcactttcatggccaggctgaaggtccagctggagctgggcaccaatcccaactactgtgccttccagtctcagccattttgtgtggggtatctttacccagaggcaaatatctctcaatgagcaatgtgtagtgaggtctgggtgtctcagttcctccccaccctaatgtggcttacactctgccttctagaagcagctgctgtatggcatgtgtatcccaggtctgtctctgaataggagtgcccagctcccagccatcatcctttgctgtgtttgccctgtgggatgagagtggcctgtgctgtcccaccaggtaatggcactcttttgtttgtgctccaggcactcctctatgccatctggctgtagacccgttgcctggtagaaaggttattcgccagtctctagctgagctccagtgaaggccccaggctgtcacttgtgtccaccttcctggagagtttggtgacccatctctgcctgtgtttatatcttaaacactccgtccctttcaggggtcttggatatgaccaattctagtgataggttcctgaagtcagtctcctagaaatctgcagggccatctctttcaaagtccttatcctttcactggctgccaggtgtgcaggcaaggttcagctcggcctgggattgcaggggctctgtaggacttctgtaggagcagagaaggatgctctgctgtttctttgctccccgacttgcttccccaccactgcctgctatctgaacactcagacctccttctcagaagcctctgtacacagctcagatgctgactgcagactgaagagctggcttgcttctttctggcttgggctgccctccctgaatccagtcttgccttgttctctgggtccactgtttggaacaaggcagaccatctgtgcttggggactagtatgaccctgaggtcctgccctatttatcttcattagccacggggaggttcatacctgccctctctacaaatggaggggccttggatggtgccaaaaatcaactgtaagctggagagtgcttctgacccagtcctgttgggttcacggtgatgcctagagttttggtcctggatcctagcattcatcccctcctacctctaggaggtctgcctggctcagacattggtgctgtctacccctgtactctgccctctttgtcaggggaggaggcaggaggagtcagcttccctgtcgcttcttcatggagccatattcccaaagaaaactctgagcatgttctttgactgaggagccctttaaagctccctgctgtttctggtatcataaaagaaggcctcagctcagcattcaaaccctctcccatggagcccgtctatccttcatcagaacagcagtcagtgttctcccttatgtgagtgtctgttccttgcagatctgcagaggcctctgtgccttggctctgctcataccggtccctagcctggcatgtcctctttctgcttcagtctcaactgctgtcctctgaggcccccatgccacctccagctgtgtgactttcacccccttccactgttgaatctgggcccgggctctctctagtgtcctttatagacagatagtgggggttgtgagctggaatctgtatctgttgtggtttccagcatgagccctagactgggaacacaggaagtgactggagagattcctgttggactccagggggcagtttgatcacttgctgggaaagaaatggttcccagtctgtcttcttagggcaagggaggtgttgatgggaaaatcaagctccgctggtggccaggtttctcttaagtccctctctcgggcttatgaatttcgttgtattgtttttcaattttccctgagcatctgctactgtgaaaattttcattatcactggcaaagatcccctctcatccctgttggctgtaggagagttctgagttctctccccatctgctccaaagcacctggagcctgagatgggtaatgtccctggccagctgggcacgttctcagaagatctcagagatggggctcagcgggcagcctgcttggtcagggatgctttggctgtgcccaagtcacgaaggctttccctgcctgcctcttccctgcggtgtgggtggtcaggccagggaagctgactatgggatttggccagcacctcatcacctgttttccaacatgagggagacccttgcttctgaaggtcttctcagacagtcttgatgttgtagcaagtatgctccatctctaacagaggactagctctgttttctgagactgagttgccatgaaggcaagtagaatattgaactgccaggaggcaagactggagctgtaggtcaggtgtcagtcactcactcttcaccttcattgagacacctgcgtaccctgcttagaagcagccatggtgagcataggaaggctgtggacatgctgtcttgctggccactggtccaggcctggctctggctgcttttggtctttctcccttgcttttaaacacggctggggtgctttccttcgtgactctggcttacactctgcactttgggtaaggtggccacacggacacagctgagacactcccgggactaattcatatgattctctaccctaatgtagagatgacatgctgaggtcaggcattgagaggtagcccagcaagagccatctgtagcatgagacaaaaactctgagcccaggtagtgtgacagcaggacttgagtcttggcaccaggctgccccagctgtttacgagggggaattctttctgtttacgtgccattttttatggtccagccctcagaggttgtgcagcagcttgccaccttcctgtctgtgtgcctggatgccattcgcatcggtgcttgacaaccgaaaaactaaatgtataatggacacttcccaagggggaaatattttagaatttacacaagacatattttgtggcctaggctgtcatttcaggactgctgtctggtgcctgtgttagatgaccaccctccattcctttttacaacacagggctttaagctggggtggtcagatttctgttttggtcctgccaaagctgtcctgcctggtggatggagctagtgtgtaagagacccctcggcaacccatctaccatccgttcacaggccccagagtcagggctttggccagcaaactcagacagcgtccttggacctgtctacgtaagatggcttggagtgactggcacggtgtctctgcttcactctcagcttctgtccctcctgttttcactctcccaggtgatgtggtgaggggagcaccactgagaagggtgaaggcaatatggggttccctttgctagtcaactcccttggctgcaaggtacacgggatgtggagacttgatggcagccaagagaagaggagcagcaggctggcaaggggaaggggctaggcctgtaatggtccctgaagagggagctgctgctcctgtatcttaaggagtactaagaagttagcagcattgagcttaaggctcactttaagggggctgatcatagttcccacagaacggtggagggtgggctgggggtcatactgggaatataggtacaacaccccttgtttgagaagaatataagatctctctgcccactgggatggcttctagccagtgttccaggcatggctttatcaggccacggaataggggacacagtcacccacagtcaatgagtttaggaggttaacaaggttcgagggtatacttctggatgctcatcctagagacaggcccactgggtggggggtgacctctgtcacacaaggtttacttgctgagtgtagtcatctctagttgttctcatgatagccagggcatctgggtgtagcatcatcctgctacaaggtgttacagacagggatgtccttaggtagctcagcccaggaaatgacacagacccatgagcaaatagggactctgactgtattatctaagcagaggacagttggaagccttgaaagcaggaggcacttcacagggtctgggggtgggaggataagagggctaagcattggggtgaaacttagaagggcatgctgatgtgaacttctggtcatggaacagcaggcacaggaagccacagggcgctgccccagcagaccctccagcttcccacatggtacccgggaacgaggacgttgctcttagaaatctgatggtcaagagaaggaatcagtagcaagtcttagagctggagtcggggctaggaaagctggcaggatcggaactaccaagccttccttagatggagcacagtgggcctgtgggaaggtgtcctaggtctgcttttgcactatggatggaggcaggagccaggagccagggcaaacactgggtctggggctctctggggcagttggcctgacatgggagagaaggtgtgagtaccagtggtaaaggagtaactttgcaaggcttctaccacccacacagggagacggtgcaggagatcacaaagtgatgctatggagaatagggaggggatagctgtagtgattcagacatcaaatacaggctgaggagggagagggtagtagcaacctcagtcagtagcagtttcacatctgtgagaaccactgggagctaaaaagaaatacttgaaccaggactgaggctacgtgctatcacttccaggcaatcacagaggacagttggtcactggaagtgctctcagagacttggagggagggagggagcaggctgaagacaggctctgttacctgactggccgtggatgtgtaagcttgcctctggttcctcaggtctagtgtccagggacctctgaatggtctgttgctaggcaaccaggctgttgccagcgttgccaggagaagagcctgtagggcaggtcttccctgagctagccaaggagtgtggtgggtagtaattgcaggagagatgtggcttctgggagctccgtatccacaggcacagagacactgctcttcatttgagtatagctaggttgtgagtgtctgtctggtcaagagggacttgggcttttttaatcaggtgattctagaggtgttcgtagcctcacttacctcttccccagtagagcttcgattgtggatagttcctcttaaggcctgtgtgcaagtgcttggacgtcagggtggtgctattgggaggtgctgggaacctagaagatatggagcctatggggtgtcttaggtcactggaaacaagtttttagaatgtgaggatgcaaggccttctggtctcctctgctccccaattcctgcttggcaatctggcccttaccagaggtccaaggcaacagatagccaagtaattccctaggacctgcagaatggagagctaaacgataccttttctctctataaagttaattgctgtgtgtcttagtcagggtttctattcctgcacaaatatcatgtccaagaaacaagttagggagaaagggtttattcagcttacactttccacactgctgttcatcaccaaggatgtcaggactgaaactcaggcaggtcaggaagcaggagctgatgcagaggccatggagggatgttccttactggcttgcttcccctggcttgctcagcttgcttttttatagaaccaagactaccagcccagagatggcaccacccacaagggttcctcctccttgatcactaatagaggaaatgccccacagttggatctcatggaggcacttccccaactgaagatcctttctctgtgataactccagcctgtgtcaagttgacacacaaaaccagccagtacactctgttagtttcttggagttactcctgtgttcaaatgacttggcaaaacaacctaagggaggaaagtttattttgctcatagattcacaggcttcatccatgggtgcttggtcccatgtgcttgagcagaggatcatggtagcaggatcatgtggtcgaggagatttttcactccatggttgtcaggaaacagagtgagataagatcccacctccagcaacttaacttccttcatgggagcccatctctttacagcttcacagcagagggcccagcttctggagcaggagagcaattcatgacaatgaccaggactgtcactgtagtgatgtgaagtgtctcctatatacactgaatgaagttagccccaagtcctactttgcgctctctctggacaaactctgaggaggacatacactaacagcagacagctgtccttttgggcatattttccacatactaaacatggctttagtctctatcagttgctctgtttcctcaggctcctgaaacagaaattagacaccttggaaatttaactctggctcccctgtgggtttttataatgcactcagcttggctgcctgctctggatcctcccgtgtagaatgaagtagaggagccacttctcaggcaggcgtggacttcagtgatggggtggggctgcatggctctcatggcagggattgtctttctcctctgccaccagaaactgtaacatttccctttgcttattatgctaggattccttggctagtctgcttgtatgtggccacgtgagggtgaggccctgccaatctggtttcctttgttccttagcctgtgtccccagagctgagtccctgaagtacctgtgctgcccaggttctgagccagttcttcagtattgtttggggctccaagttgtcctacctttgggccctatgggtccagctgtcctatacttgggctgcttcctttgacagctctaagacagccctgttgttcctaattagactaagttgtggagggccagttgcatcatccatgcaggaaaagatcctggtctagatgcaggaggccctgaagcccaggatctgtcctctcactatgttgctcacggccagccctgatcttggacaaggcttgattttctgccacattccgttctctgggctactttaccttgaaaccctgatatgtcaaatgattagaatgcacacacctatgcttctgcatacatgttatgccatcgagtgtcccatgaacatctgcattaggtcctgagtctgaagatgtagaaagccatttgcctcagtttccctttttgggaccttaaagatcaatcatgagatagtataattatatgtaactcagtagcatgtgcaaagacaaggtattctgtgggccgcaggaaaaggagtggttgatttcatatagtgggaggagtcagtttcacagggggaagaggggtttgagggatatatgggggcttccagggtagaggagaggaggaaggatactgcagggaaggcaaccagcatgcacaaaccttcaggttagtgtaagtgagtgccacaggctgagaggacagggcatgggaagtttggaaaacagactgatgtcttctggcatgtggattgtgggtgctggtggctactttgatttccaggcagtggggtcatggctgtggtggaccctagtggctgctgaacttgagtctgtagaatgggatggagaacggggagctggaagatacaccgacatcccttattcactgggtagagggaaacagaagtttggaccaggtagaggaggtgacctctctgagagtctgcagaggagtcctggggaacccctgagtttgggtgctaagagagctttcgaggttcccagaacatgaatgtgctgtgcaggcacgccagggactcatcctgtcctgatataacttccccagagcaggctactgtgtgaatcccggctgagagcttggtgttccattggcggagcagtaaaagtcattaacgaggagctggagagttataaataagccagcacattcccacccagtgttccctgcctttccagcccgcgggagcagggaatcggttttgattcattaattggcagagggatgaggctccagagagcccacggctctgccaactcttccccaccctcctggttggctccaggcagccccctgtgcttgctgctcacctgccctggcgacgggccatcttcctgtggggctcactggtcctgccgccctggatcctctcaagctagcctgagtttcagtttgctgtctttgttactgttcccttgtccattttaacccctcacttgcacactatctttagagtggcacgctgattagtgttcccagtctctggataggtaggctgtgccttttcctttgtgtgcctcaggcattaggaggcttggcgagctggaaagccctggagtttgcctgtgaaatctagcgcccccgccccacgatgctcctgctttagtgttgtattaaataggttgctgcccactctgcagcatgggcactggccagggtctgaagggctgagctgacaggcgcttctccacacagtccagtagcaagggcaggagattgggaacagtggccacaccactgtggtaaatcttggcttgaagtgaatcacagtggaggaagattgggcattgcaaaaagttctctgggaagactagttacccatggagcaatgggaggctacacagattatgtaggcaggaacgctacatatttcttgggagtcttcaggaaaatctaagagttctaagagctggatacctgggtttctttgcaagagtgctgtccccttgggtacacgtaggcacctggtacagagttatacacggctctggagactgtcatgggttttcatctgctttgaagactttgggaagctaatgtgtttttagatggggccagcacatggtggctaatgcttcacgaggacctagtcgctgtggtgtgggaaggctgtatgtctgttggagaggttagatgtgtgtgggactgagggagaggtgacggtagtgtgggccgatgaaatccagcagagtcagggtgtatttggaagacctgaaggcttggtgtagtgggatgttgaaggtcaaaaacatgtggctggggatgcctctctcctgaaagtggacgaccattctcgtatatgtgggagcgctgtggtgtcaggtgtgagttgatgctggtttcaatcaggtcaggactggcttggggttagaagctcaggggcagattctgaaccagaacactaactatgaaagcttccatagggctaggtacgatgctcagaggtaaatgtgcaaggagacctaatgattccatagtccttaggtgtagactctgggtgtgggagaaggcagagaggcaggcatctgcaggactggccttgggagcttccttcctcagcttgtgctacaaaggctggtgggtgtgaaagcccgaaggcagggggctgattacctcgtgatgatccctctagtttagctctgaagggtgaaacaaggtcattagttggagcttgggaggttccaggagaacacggaggttaggaggggggtgaagaaggcagtaagtgacaagggaggggtcttcttgtctctttgggagcacctgggggagagcctgtgcaccagggccacagatccagtgcaagccttctatagccctgcctccagagtcttcccagcctgtggttttgtttaccctttacatgtcttaataaaagatgaaaaatatttattctccatagatcaataatttaccgtgagttatgacaatactaaatttggtcaattattcatgggctatcaagtatttataaatgctaccttaatttaaagcattagccattagaattcaaatattcataaagctagtgccagccgaaaggaggaagggcagggttcaggtagcaggggtggctggggagagagggcgtgagctgccctaagagctctgccactgcttgtgggaatggtgggggaggcagaggtgttggactccctgtggatgcccttgctcccaggtaggcagggctgacctgggtctgctccctgcctgcctctggcttctgccgcccacagagaccagctgagcctagcaaagcagggctgaactgaagagcctatgtgaggctgctcctgctccaggtggaggccctttcttgcctggttcttctggagatactcagctgctccttagcacggaactcagaggccggttagtgcctggctgctgggcagtaggcttgcgattaagaggagcaggggctgaaaggacaggcttggcctattcagagatcaggtctggtttatcagggggagtgtgagtgtctggctatgcctagccttgagacattcagagtacctggaagagaacaggataaggatgctaacggccagcatcactattgggtgaaatagaccagactggccaatctcctccagcagaagcccctggagcattgtgtcacctaccggtggccttggagtttcctaactaaacccagagggctgcataagagtgtccttgcccagaatggcctccatacctgaaaggctgctgctctcttccagcagtcacctgcaggcaggtacccagcactcactgaactgtggaattctctcagtggggacaggtctcattccttcttgcctgctcctccccagggagtgccaagcttgctgctacaggcatttctattcaagcaagggttggatagagtcagctgaggatctcggtcctgtttctttgtatcttcccctcactggctatgggaagatctggtggcttggttctgatttcttcaatcatatggtcctggcctcaggacgtagggtgaagagtactgaaaatttgttctgtgaagtagcctgtatacacctgtcatgttctacccagatactcctcaggggaggttggtggggctgtgattgtggatcgagggctaattgtattagtgtttagctctgagcgcaagcagtctctttcctgctattttctgggaatctagagctacggactgactggcttagagacctctgtggagaccctgtgctcccaggcagggaacaggaactactgttcattacagttcgtctctattctttcttcccctgccgaggagttgtgctcagggagcacttatcaatctatcagacctgcatgatgatgaagagagaaatcagctttatggccagatgatattggaagaaaagagtgatatcaagagcagttatcctccagagagctatggaagcccgctgagctccaagctggaaaatctgcattgtggagttcctattccatgcgaagcagtgtgtgagaccctacacataaagaaagacaggcagggaaatcacagggcccacagcatcgttgcagtagactttaccatatgctgggtcttgctactggcatatgcagggtggggtgaggcaagggggcggggcagggcaggtcgagagggcggcagggagacagaggacagcaggaaccatttttgccaccgtggggcttgagctctgtgacatacatactgtcatctgtacttgatttggggtggggtggggtggggaagagagctctcctctgacaggccccacagtaggtctctacagcaggtccaggctcagactctgctcagcatttcagcataagcaccatatgaattgtgtaacatcctgtctcacacaaccttgattaagctaatagctgatttggctttgatctgatatattttgatcttattatttttatgttagaagcctccaaataatcatcatttcaacagtgccccaattagcagaccattcacagtggattgaaaattgactcacattgggcctctccattagcacctaggagagacttccagcattaataatcctccctgcaccagaggctgggtgcttgtggtactgcaggtggtcatatgaggggcttctgtgccccttgtaggaggaggctatcagcacagttaggcagtggcaggatggctcttaagtctgatggtactactttcattttttagtaataataaaaaagaccttttgaaattagcttatatttcatcatggcatgttcttggttctccagcctcccttctcccatctcctgcaccctcctgcaaggtccccttccttttctcccatctcctgcatcctcctgcaaggtcccccttcctcttctctcatttcctgcatcctcctgcaaggttcccttccttttctcccatctcctgcatcctcctgtaaggtccccttcctcttctcccatctcctgcatcctcctgcaaggtccccttcctcttctcccatctcctgcaccttcctgcaaggtcccccttcctcttttgcaacagctcccctgatggtttcccctcttcctcaaagcacaggtgacttttaaaagagggcagggtttgagatagggttttgccgtgtagctttggctggtctagacctcactctgttgcctacactgaccttgaactcatgacatttcttttcctcagcttccaaagtgatggggttgctgcccatatgtgcctcaacacccattgataaggaatgcttcttaaggttctgggcacagcttgggtgaggtgttgatggggaatgataaggatggtatttggaaagaggaagaaaactgacatgagcctagcacctttctgggtgcagggaggagaaggcattccaccttctgagtcaggagagactctcatctccattgactagaacagcaaggctcagaaagggcacacacccatgaccacatggctgctgaccacgtggttgaaatgggacttgagcttatgagattcctatgttcttccaagctcttagttgctagtgagcagttttgcccagattctgcatcttaatcatggtctaccctaccatgtagccccccccccatttcaattggtttaaattcttcatttgagattctgatgccaaacatgtaactaactacatttcctgcatcctggaaggctgccttaatctttcctcttgccaaattatagaatgtgtcctggaagaatccaatgtatgcaggaagaggcttatgttattggtgtgttagacatagacatgaaatatacaggagggcagggggcaaacatcattgtcatgggacatgtatgtgcagatggggaaactaaagctcaaagttctgtgacttcagagcttggtggatatgggctggggagctggcttaccatagatgtccggtggtgacttaagaggagctgggcagatgggtgatgagccaggggtgacctatagcttgtaggaagggtgtaggagatggagttcctggaccattaggccccacactgttcaatttatttgaaaatcttgtttaagattctaatgcagggctagagagatggttcagcaggtaagaacaatggctgcttttccaaaggtcttgagttcaattcccagcatctacatggtgattcatagtcatctttatacgggatctgatatcctcttatgtcttgcaggcttacatgcagatagaatgaataaataaataaataaataaatactaaaaatgattctaatgcaatgtcttagtattgaagacacaagctagagaacaagccattcaccatcatggtgccttagctatttgtgcttcctgcattatttgaaggcatttttttttttatcacattgtaaccagcataggttttgtggtttcctttgtttgtttttgctaccactacctcagaagcattttcatcatgtctgtggcagtatgggaatgaactgggagctcaccttagtctagccttgtcacttgatgcttgtgtggcctcacatctcattatctgggaagcaaaagcagaactttattttctaagtggatatgatgagaacagcatgaattcacaaatatcacatactcaacagagcctggctcggagaacattcgcacacagcagtccctctttctccctgcctccctgcttatccattattggaggattctttttactttctaaagcaattacctattcatgtcatgaaattttggcaaaatataggaaaataaaaaaagaaaaacacttacaaattgctttcattttgaacattttgcatttttttccttctggtctttctttcatgcatattgagttttatttaattgatattgtaaaatacatagatttttacatcatttttcatgtacctttctatgtatgacaagtgctttcttatattgttgtggggtacacggctgtagaggctgtgtgtgctttctttgtgtagtgcttccataaccacgaactacttgcatctttcagatagtttgcagtgttccttgggtaccactgagtgtcctcttttacttttggatctagttccatggtctggatagtttcccagagagtaatgaggaacacagagcatgaaaatgtcaggactcaaaaaaaaaaaaaaaaaaaaaaagagccgggtgtggtggtgcacgcctttaatcccagcacttgggaggaagaggcaggcggatttctgagtttgaggccagcctgatctacaaagtgagttccaggacagccagggctacacagagaatgtcttgaaaaaaaaaaaaaaaagaaaatgtcaggactccagtatccttgcacaaatctttaggagctgccatgctttgctcactatgcatgcatgtgtatgtgtgtgtgtgtgcacatgtatgtgtgtatatgcacatgtgtgtatgtgtatgcacatatatgtgtgtatgtgtatgcacatgtatgtgtgtgtatgtgtatgcacatgtatgtgtgtgtatatgtgtgcatgttgagtatgagatagatcactgtgtactccttgagctcaagggtcattagacgagccatgtagttatggaggtcgtgtgcagagccatggcagagaattgtgggcatcttgaatgaaggctgtggccagcctcgggaggttgaatcgttcctgaagcaagaatgagcatgaagatgagttgaggaggtgaggggtgcaatctagtatgtacaggtagaatgaagagcatgaggtgcagacattgtgtgccttcacgaattgccccaggtaggcacatatgtgtgtgtttgagtgcatgtaaatgtagagaggtcaacatcttatgctgacgtctctctctgagacagtatctctcactgagcctggggttccctgacttccctagtgtagtgggtcggaaagccacgggttcctcctgtctctgcctacctacggctaggattatgagtatgcaccactgtgtcagcttttaaaaaactaggttttcctctttcaaaccctgtcctatacccttctttgctctatttcaaatgcctgggtttctttttcattaattgttgttatatatgtacgttcctaaatacacaacctgctcagtctgtataatgttacttgtatgtatatgatttcagggctgaccatttgccattgagtaacccattgctgtgctcgtccctggggaaggctttctcagccttccttagccgcctgcagagttgttgttgatgttgttgcaatagatggagaccattacagaaaaccaaagctaattaaaatatagagttgcggagcccggttccaaatgataggtcttcaacccaacccctgaagccccggctcaggaatcattgtggaagatgaaatgaccatgagagccaggggaacagggagtttgcattgagaccgtggctctgaatatcagaagctaatattcatcaagtcccaccaacatggctgctactcgtgagctgaacaagggctatattaagagatctgctaacatggatgggacaggaggctcacagagctacaggcaactaaagaccatgggttctgggtatcagaactgagattctcatgactgtgtggcaaggattttacacactgagccgtctccccagttctcactgggtgtctgaagacagacacaatgtttaaatgattggatttccgagaagccagggtggaggggtagaacatttgggtagctatgagatccttgagagagacctcatgtcctttgtgtacccagcctcaggccctgcatgggaagtggaggaaccattgggacctgggacccgagttatcatctacaatgtcccacagtgtgtatggcaaagctctagtatgggagcagctgccattggtgccagccagtgtaggggatagcccttctcacatcttttctaccctctccctcccttctccttggggtgaccacccttgtttttcgccacttccccagccgggtctgaagcattacataaactgtagggcccccactaaggaactgcattgtcaaagtcgttcagcgtctgctgcgtgcagcagatggctcgctgccatccacaggctgtgttttcagactgcatctgcttccccacattcgtaagacatgcttgcttcaaaactggtgcgtggagttggagtgtgggaacaggatctttctatctgctctgatggccctagaaggtatatgagcgtgtggtcaacggtggcgcgtgccccttgtggttactgggcgacgacgtctaaagttcaggctcctgagtgggtcagtctcagaaagggctgttgtcatctcagtctcctttctcctctgtgcccttggtaactgcctgagctatgggtgcatcttcctttgtgattgtcgagtggctcttgaacaatcctgggcaactgtagccaagcacttcatctgggctttgacccagtatcctcatgatagaactcaagtggacttgaatcctgctcaccacctctccttattctgggtcctctgggggtaagtatatgtcttcctgacatcatgatgtcatccagagcttacagacacaagcagtccagttcagacaacaattgcagagcacatgctacactcttcgcccatgaaaaggaatacacaaattctgcagcatgagttttggtctcctccccagcatttggctacagcccaaggtgggaaacatcatctaattcagagttctgtttggtgaatcagggggatcgggggtggatcccttctctcctacccttctttagctagcctgggtcaaatgatggccccttctgacttttctttcctcatctgttaaatgagcctgagatgtgtagctttaatgtttcacccactaaggttcataggagctgctgaccaggctggaactggctcttggtctgtgtggggaggcatctcagggccacaggcatgagctgctgggtggagctgtgtggatgaagcctctacaacagtgccccatgctgatctcttcctgtctttttccttcctttccagcctgtgacctcatgacccagggaattttggccttggtcacatccacgggctgtgcatccgccaatgccctgcagtccctcacagacgccatgcacatcccacacctctttgtccagcgcaaccccgggggttcaccacgtactgcctgccacctgaaccctagccctgacggcgaggcctacacactggcttcgagaccacctgtccgtctcaatgatgtcatgctcaggctggtgacagaactgcgctggcagaagttcgtcatgttctatgacagcgagtatggtgagtctggggaggcggggctgaggcttgggtctagggacagcttgatgctgggagcctaagagtaagaagcttcgaccatgggactcagtactggcatactgtcagggcatatatccacgttggtggtctgggctgagttttcctcagggcggtagggcccaaccttgagctttgtgaatcagggaagagctgcaaaaacagatctgtagataggcactaaagttgcctagcaacatcaccttatcatgacagctgaagtttgaatcatcttagaattttcaataaaatattaataaactgctggcagggatctgaagagctacgtacaggcagaagtggaggctgcctggctaggtcttcctggcaccttctctgaaggctacccctcatgctggatggtggtcctctgaaggctacccccatgctggatggtggtccagcctcaggtttttgtttacattcactttgatctgccctgtttcagggtctgaggctggggcaaagatcagaagtaggggtctgttagccggtgggcctgaggatatgcatggctgtgcgtggcttctttgaagacctcgtctgtggaagtaagcataatttatttgttaggaaaccataaaagccagctttggagaagcaggttcatgttttcttaaagcttctctgtaagaagaccatttccaaccctgaggcaaaatggtttccacgatttgtgcttcagaaaggttttattcggagaccattgataatcacatatcactactgagaaataatgtagagggatatcatgcgtcctccacccaggttccctaagggtagcactttaatgagctgtatcacttaattagcggtatcacaatatcacaaccaggatttgaccctcctgcagccggcagacccttcatagcttgtgtctatgtgtccgattccagtctgctgtgggtgttgggtcctttgtagtttaccagtttccatgtatatgtccagaccagtctgctttgggtgtggattctttctgtagcatttctctagcatgcatattggtgtgatcactagccaggatccaaagtggttctcttaagaatccctatgctacacgtttatagccacagcccctgtgtcacctgttccaggttgctggacacttatggggtttggaagcccccttggctgaggttaggatggagctgtacaaccctgtaaagtccagttttgtctcccggtgaaataacccgtttgccaagcatgtaactaagaaaagaaatcagcatatgtttgcatttgcctaaatactctgcttcccttagtctggnnnnnnnnnnnnnnnnnnnnnnnnnnnnnnnnnnnnnnnnnnnnnnnnnnnnnnnnnnnnnnnnnnnnnnnnnnnnnnnnnnnnnnnnnnnnnnnnnnnnnnnnnnnnnnnnnnnnnnnnnnnnnnnnnnnnnnnnnnnnnnnnnnnnnnnnnnnnnnnnnnnnnnnnnnnnnnnnnnnnnnnnnnnnnnnnnnnnnnnnnnnnnnnnnnnnnnnnnnnnnnnnnnnnnnnnnnnnnnnnnnnnnnnnnnnnnnnnnnnnnnnnnnnnnnnnnnnnnnnnnnnnnnnnnnnnnnnnnnnnnnnnnnnnnnnnnnnnnnnnnnnnnnnnnnnncctttgcttctcttgtctctggcctgcacacactattcctcttgaagggctcttgagccacagctgcaacaaaggcaggtgacagccctgtagcctgctcactgtctggctttctgtgcttcctgaagactgagcaaggcctggaggcactggcccagatgctgtcttttcttctcattatatgtctcacgtccatgtaactcagcaggcaaacattctaggaaaggtgtcttccctccccgctgtccagcagagcttgcatcttgtttgcctgctcatctgtcctcagcccacttggcttagcctgccgctcatgggagcttgtccctggtgtacactggactcctgcagaggtggtcattcccaggagagcaggccatatgcttttctgtgtgtcactgcagtctggcactgtgtctggttaaacgaatgacaagttcacaggtgaagacaaaggggagatgtggagaaagatgagggtactgggtgcactgacctctggtctaggatgggcatagggaaccaggaagcatgattcatctcacagaagaacttccagcccatcttcttcagtcccccaaaccctgaaccgggaacacccccagagtgtgcctctctgctctgatgctttgctaccttcactgtggttgaatttagtcctcggccttttatcattaattccataaagatgccgagtgaaggcgccgtccagggtgctgacccaaatggcttcagttgctctggaggtcacggctctttaattgtagtttgggtaggaccctggtgtttttgcacaccctggcccccagcctcttaatgtgacaacctttgaggcttgtttgtgcctgtaaaagtttctctacccttagtgttgctgcttggcctgactataatcctcctgtatattccagcctgtttcctctcataagtcccattaggctagcgaaggccggtaaaacccacaacacagtcacccttcagagtgggcacgtggtggatcccatcatcactggcagtgatgtccccacatgccatgggcgggttcatgttgccagtacacccgtgatgatgtagtttcagatgagcctgattaaaaatcaaattgagtgtaactagtcttttatttctcccaaagtcaaatggaagtgatttgggatatagttgcttttctgtgctaatctttaagtatctttacatatgttatttcatttatgccacactttaaccactgaagcaaatagggctcagtgagatgcgtttgggctttgagacctgtgcacaggccaggcaccatcctgtttcttggtgggctttagattccctctcatgtgcccagccagtcagaaccattgctgaagcaggagtgtggctcagaatggacccagcatgccttagcatagatgctcatcctttagtgaccgtcacatacagacccttcctttggggtgctggcaaggattgattcctttccattttcttgtcagtttccctttaatctcgggaatgtcttcccctggtggaacctgaagattggccattcacactgtgtgtgagatcagagcaggaaagccctaagagaatgtgacagaaaggcatgcttaaagtttgggtgttgaatgtggcctgaaggtacacatgttaaagacttggtctccagaggtgtgatgttgggaggtcctatggacctgtaagaggcaggtcttggagggaactccttagggcaataaaattattagtaacaataagaggaatttctggaacccataatcagttaaaaatatgaaggaatcccatgtcctcaactctggtcattttctatccttgctaggggactgaactgctatttgggtcatgtccttgagaggattataggggtcccccctttgcagttgcttgtttcctctccctgatctgagctgtgctccctgtcatgtgctttcaccataactgctgcacttcctgaggctcaccggtggcaccaatgctgccagagctttagcataaatgtccacagctatgaaccatgacaaactttccttctacatggcgattgcctcaggtccttcactatgatgacagcaatctgactaattctgggtgagagaggagtttgcatgtatttggtttacaaaatatgagaggtgccatttggtacgattccatggaaaacacttgtatgcttgttatgacagcacaaggaaaaatagaagagaaactgacattttgggtaggaaattcataaaataccaaaggtttggatgaattagagcacacaactttctgtcttgctgcttcaaatgctggtgtgtgtgtgtgtgtgtgtgtgtgtgtgtgtgtgtgtgtgtgtgtgtgtgtgtgtacatgcacttgcatgtgtatatgtatgtgtatgtttgggcatgggtgtgttagtagctttaggcacagttttcctcaaagactatgtctgtggttgtggtgggatcttcagatatcattggctgattcactcataaatattcatggaatccctaccatgtgacaaacattttacttggtgtttattttaaatgaaggaaaacagggatagaacaacttggctcctgttgcctataattggaataagaacccagggcccaannnnnnnnnnnnnnnnnnnnnnnnnnnnnnnnnnnnnnnnnnnnnnnnnnnnnnnnnnnnnnnnnnnnnnnnnnnnnnnnnnnnnnnnnnnnnnnnnnnnnnnnnnnnnnnnnnnnnnnnnnnnnnnnnnnnnnnnnnnnnnnnnnnnnnnnnnnnnnnnnnnnnnnnnnnnnnnnnnnnnnnnnnnnnnnnnnnnnnnnnnnnnnnnnnnnnnnnnnnnnnnnnnnnnnnnnnnnnnnnnnnnnnnnnnnnnnnnnnnnnnnnnnnnnnnnnnnnnnnnnnnnnnnnnnnnnnnnnnnnnnnnnnnnnnnnnnnnnnnnnnnnnnnnnnnnnnnnnnnnnnnnnnnnnnnnnnnnnnnnnnnnnnnnnnnnnnnnnnnnnnnnnnnnnnnnnnnnnnnnnnnnnnnnnnnnnnnnnnnnnnnnnnnnnnnnnnnnnnnnnnnnnnnnnnnnnnnnnnnnnnnnnnnnnnnnnnnnnnnnnnnnnnnnnnnnnnnnnnnnnnnnnnnnnnnnnnnnnnnnnnnnnnnnnnnnnnnnnnnnnnnnnnnnnnnnnnnnnnnnnnnnnnnnnnnnnncttcacaccggcactaggggttgaactcagttccttatgtgagtgtagtgagcactttactgattgagatatctcaccatctccttaaaatcactttttaaaaattagaagttatacatgattataatgcacatgcccaatcaaattattaataacaataaagggaatttctgggatccatagtcagttaagaaaatatgaaggaatcccatgtcctcaactctggcatttttctatccttgctaggggactgaactgctttttggattgtgtgctagccagtcagaccctggctttacttggctgttctagatcctataacacattgtttggctgtgaaccttgtgtctctgcagtgacacttcagtggctgcttttctcattctccaagaggtttctgaggttcatccatttgatacggatatattaatcattttattatctcacaatacatctgatttatccatctgatcatcagtgggcgtttgggttatttccagctttcggtattacaagcggtgctggatatttatctcgaggtggattgtgaagagttttgagggtctgttctgaggaaccgctggatccacacatgtttatgttgttcacatctaccgagtctgtctctaagtgttccttcctgtgtacactgcctcttgctgtgtaggaagcttctctaagtccccaggcccagcgacatctcttgttgcctgtacttggaggattctattgcatagtgttctattactctgatgctaatttacatttttctgtatacgatcttttcagatcctcacaggctatttttgttttctcttctatgacatgcttgcttgtaactgttaattttgatgctgagccttttctttggtgagttaagtgtggcaaataccttccatcagttgcttgtcttcagaaacagaaggtctgtattgtactgttgtcaaatgtagtcatcttttttatgctcagctctcttgcctgtcttatttaagaagccttctcctaccctcatgtcataatgatagtttcttgctgaaatctcattctcttcttggagagaagatactgtcttagcatgctgcctgcaggagagccctagcccgagccatatgtagatgtggctgtgtgctcacctctccctgcagctgtattcagcactccttcccaggcattgctgtgacttggggcctatcaagtccttggtggtgaatgagaaaggtgtatggccattcagtataacctgtaacaggtgcataaaggacacatggaagccaggcaagcagagggcagtggcttctggaatgagttgagagagtgtttcagatagaagggagagcaagtgagagagcttggagtggggtgcatgggggggggtggtccgtgtgtctgggttacagattgtctggatcacaggccatggccaaggatgaagcgtgaaagacagatggaaaggcctcacaggccagctgcaagtcctgggaaatcccagatccagaccttgctgcctctgctgctgctcctggattctaggtttcctgtacactacagacacattgagtgcagacaaaggagatgagagcctttagaccagagctctctgatccttctaccacttctgctttagactcactggttgtaaacaaaagggaaaatactaagatgggtgggaactgcaatccatctgaggataaaccccaggcccagagtacaaacagaatttcccagtgaccccagctcctgccccttagctgcatgctgagtgacaggaagggccttttgtcatggcactccaaagtagtcctccatggtgggtgtgtgctcaccgttccaggaaagcaggatgtagacaactatgtggacttgtgccaggatgtggctcgtgagtggccaggtctgatttcccaagcttggaacctgcctcaggcaaatctgggacagtactccacaggtggagtcctcacggtgcatgaggacttgtggtgttgcctgtcacatcagaagggcaataatcttaatgtccatagctatctggataactattctaggatgtgtacattcagaggaacacaaccgtttccagatggcggtcacttgacagtagcaaggcgggaacgatgggccgagggtcaccctggccctgcaagcacaaactcctcagtacgtgcacctcagcagacacgcacagttgccggaaggaaggctgctttagtctcttgggacatgtaattttacagcatgatttcttgtatcttttgaattttatatatgtagtgcaaaaagcaaacgtggaaataaaagttaatgtagatggccaccccctcgccccttttctcactgcttatgctgacttctgtgagtcttaactgctgctcctgtggaaggtaattgcagtctctatgacaaaaaggtaaagcaggcaggagagagactggcatctggtgagtggcctgtgtgaggttaggggtcttggtcctggaacagtctttttgactcgaatcgcaggtctttatagctgttagacatcagccaaatcgctcaacctctcttcctttgcacaaaggggatgaaatgaccaccctactggatatgatctgcatgtggcttaagtattgctcatgtaaagggcttagccttgtgttcctgcatgctgagggctcaatgagaccctctaatcaggaaccggagatatctgtagctgaactgtggccataccatcctggctttgcaaaggaggcctgccaagcttcaggggagttgttttgttcccagattgacttgctgtgcagcctagaacataactgtatcttgggagtgttcttggtgcttggaatatgacagataaggctcagcactctcacctatagtacagggcctgccctaagctggggtcaaattgtgtgttctcagaagtgccacaacagtgcatcattgactctgggacaccacgcctcagctggacagtcggactgacagttgttgcacctcatccctagtgccctcccacagcaaacttccctggaagaaagaggatgccgagaacccatgctgttctcaccggtgcttcttgccagctgcgtctccgtgccaatcctggcagaacagactggcggcttcaagcgtggtggcaagagatctcatgaataacacccctgatcattacagcattagtttaaattgaagtaataaatgctttttttttttttttctttccagaagaaatgagcaagtgcgtttaattgctaggaaatctacagaagaagtttgacagtaacttcaccgggatgagtgttttgtgttttgttcttcaatctaattacaaagcagctgtactttggggtgtgttaattgtagtgtttgccagaagatgaaagttcattagctctggagtttccttaccctcacatcatgttccagagttgcatttgggggtgtgaggagatgcctgctgcaagcacggatgtacacggggataggagactgtgctggcttttgcacatgctcattacattatctaggaccttaaggagtctcatgagcatgaccttggccagatcttttgattttctcatgagtcacagtagtggtcctcagaggacatacatggactctagatgacacctcccctgccaggtcctcctccggtcttggccctgcacatgagaaggagcctggataaggtgtgttaataagtgccagaaggacacccaatgggatgtggtgctcagacatgttcaagtccacattgtgctgtgtgttacatccagagctacccacaacttgctcatcatgacctgaatagtaggtcccagagaatgcccaggccagggctttgtaaaatttccactcatgacctcgttttgtctgagaaatataagtagctatataaaatcaacctcacaaatcaaatatttattcaaaataagctatgacaaaaaaaaaaataaaactcttctatatgtagatttttaccacttattaaaaatgagggtaaatatgcatactgagatggaagtacttgcttattgtaacctggagaaatgttggctaactattagataccacaggacataggatatttacaatgttttccagagttcatacgtgttttcattttatactggttgatgccttcatagccattttacatgcatgtagtacaaaatgacagaagtacgtttatggacatttcagaaaatgggaaaacttattctagtaccaagccaacattcatttaacatttttgaaaatgaaactcaagtcggaaacttcaatgtcaatttagaaaccaaacaccccaacaccatggtattcagagttatactagttttgttcttgaatgccaagaaaagatggcagaagaatgttgaaagtttgagttttccataattaaaccattacctctctgcaggagcagaaaacttcatctgtacagtcagaatactgcagtttaagagctgcaatcgtcttgaacctgggatgaggtgtttaggtggtggtctttgacatgacgtggacatgatgtcggcatgcaaagcgtgtgcgttgtgtgttcagaaccaaggcattagtaacactgtcttaccaccatgggagagcgctactggaacccctttgatgctttgcatcttggattttgaattaatttttggatgatatgcattcagaaactttatactgttgccaggttttcttgtgacctgattcaggataacaagccatagagcaagaagctgggtaccttgggtatgttgattgcacctgtaacccaagccctggcgagatggaggaggcggctcaggaattcaaagacagtttcagctacatggcgtgcttgaggatgcctggactatatatgctcatgtttcaaggaaaaaatagaaaacaatccgggtagtggtgggtcatgccttaatcctagcactttaagccaggcagaggcaggcaaagttttgagtttgaggctagtctggtctacacagctacttctaggacagctaaggttacacaaaggatccctgtctcaataaaccaaaccaaaccaaaccaaaccaaaccaaaccaaatcaaaccatcaccaccaacaaaaatgaagccatgttctaggatactcagcttttagcccagtcatggggcaacaacctatgatttgagactttccttaacttcttgcaaaggatgccagctgatggcggggcagtccctacccacattcataagctacttcctcatcttcagggctgtatttccacttgaccttttttcccctcacattttttcccattgaatttgtgtatatttactttgttctcaacatctgtctttatccaactaaaatgaaacttccagacaaagagtttagtttaaaataattttattttaagttgacatgcaattgcacttatttgtgagggcacatgtgacatttacacacatgtacatgatgttttgatgatcaaattagagtaactgcaatatttgttacctgggatattacccaaaaaaagatgatatcatttatttgtgttgggaactgtactgggtagttttgtgtcaacttgacacagctggagttatcacagagaaaggagcttcagttgaggaaatgcctccatgagatccaactgtaaggcattttctcaattagtgatcaagggggaaaggccccttgtgggtgggaccatctctgggctggtagtcttggttctataagaaagcaggctgagcaagccaggggaagcaagccagtaaagaacatccctccatggcttctgcatcagctcctgctttctgacctgcttgagttccagttctgacttcctttggtgatgaacagcagtatggaagtgtaagctgaataaaccctttcctccccaatttgcttcttggtcatgatgtttgtgcaggaatagaaaccctgactaagacaggaacctcagagctctattagctcttttgaaacttacaattaaatgtttgcaactctggttatcctcttagagtagaggaaatcattcttgctaccaatcttcaccaggtaggattttaacttttcagtattgaacagtgctgcttttgtaccatttagaacagctgttggcacttagtaggtgctcatttgatatccggtaggtaaaggaggtagttggtatttttacctggcacactgggcatttagtttcccaaggagcatcctcttttgtgatgctgggatcgaacacagagctttgcgtatgagggataaatcatggataaaccactgagctctgctccgcccaagcatttgcttctttccttgagatttccagttataactgtagcacctcccttttaaccatatctggggatgtccgagggaagcacccttctcttcccatctcctgcagagaagaatcctaagcgccccccaacctctgagaaggctccttcctccgccggttccctggtttcaatgagtggcgaaactgttgctaacacagcgtgatggccttggtgctgctgagatttggatgatcagttcggctactctcaaaggactccgttccaccctgacttgacttttcctgggcaggctgatgactctgtctgatttttcattttctcattttgatagggaggataataaaaacgcccacttcagagggttcctgtgaggctaaaatgaaatgatggatttgagaatggcacagatccctgaggtcacagactgttcctcattttcttgctcctcctgggctgccctgagcactcggcctgaggtttaggtaggcacacagacactgagcagacggttctgggaggcctggagtctggtgtcccacctctgccctgaaggcagtgcattctgaactgtagtggggagcagggtctgctcaggtaggaggcagctgtgtatacaatgccagggcgaggggctggggaggtatctccgcgggcaaagttcttgctgcttaaacatgaggacttgagttttattcctagcaatccatgtaaaaccaacacagtggtacacatgacatctgtaacccagttttgggcagggagaaatacaggtagatctgggggttttgttgcagtatgaagctagaacattttattttggtggcagcttctaatctaagtaccagtgaggaggcgttggcaggggtaatggggccactgagtaccagaggtcaggccattactacatgggcagtattgtgtctcctctgccagcatctctgaaccctcttccttgctgggagttaccctgtgatgaatctggcttggtggccagtaatccgtgtaagagggctgcgactctgaaaccagccttcattgtctaagggctggcagtgccacaggaacctggacacatgacttttgacttaaactcttatggatatagtttctccttgcttattcatgtctctacttaatgcacacacccagagaggatctatagatgcttccgaaagtgctgaaagacggtgaggttaagaagcagcagacttaggaaaacaagatggtggctgcagccgaaaaggctgtgctggctgggagggcgatgggcatgcccgtggtcatttgtctaggaaagcatggacaaacagcggtaaagatgtcagtagtgagacagagtggatggtggccccagcttgcctctgaagccagtgaagaggggagttggatttgcattttctcaggcaaacatctcacagccttgctaggacagattagaactcttcgttttaggtggggatggtagagcatcaggctctgcctctgtggaagggttttttttttttttttttttttttggcctggtccaaaggtcctaggatctgttcctggtcaggccagcatgtttgatatatagttgttcattaagttcagcatcccacctgtgcacaccagttctattggccatgggcctatggatggccactgcttggagacctgaagggaagcagagcttgggatcagtatatcccagtgtgatctagacaccatctacgacagaggctgtgaaatgtatcacaaagctgcgttagtgctcaggacagttctgtaagtatgagggagcctgacgaagtgaggagtgctgatcaggagtggaggataatgtggggtgtcagggttaccttgtgtttctagggtgatgggaaagcaaagagagattattacttgtttttattttgggctttggaataatttattattttgtaagttatgcacaaaatgatattattgctgaaaaaacttgcatgtgaaaagtagctccttgccttcctgtagtgctctctagaggaataaagccacttgctgggcatgcagcatggatacacgggtgtccccatcctaggcctggcacagcagacaaaccggcaggacagtgtcacctatattgtaaaaaaaccccgatgtatttgtatatgtgcgtgtgtgtgtctgtctctgtctctgtctctttctctctctctctgtttgtgtgtgtgtgcaggctccagaggtcagaggagggtgctaattcccctggagggctgggaactacacaccagtcctctgaaagagccacaagtgcacttaactcctgagccatgatgtctccatcccacctttgagacatttcttacctggacttctgggctctggctcctcgtccctggcttgtttctcttccctgctccatgcttgctctgcagccttccaccaggtggacagctgtgatctttgtttgtctactttgtcagttcagcatcctattgtgccttgctgtcgcacaataccgtggtacaccctgcatagacatctctgtgagcatatgtctctggggattagttgctagaaagccgagatgctggatcacaggaatgcttttcaaattctaagactagacgaaggtggtgagatgccagttccctaaataaggcggcaggaggagcgcgggacctgttctggttcttgtttttctcggggacacagagggtgctgacttttggggtgccatgctgttgaagagaactgtcatcaggcaggacagcaaacccagcatgcagagttagagaaccagaggagatgaatctggggtcctctgtggtctacagtagcttgggggaggagcaggtttcggatagagtcacttgtagcattgtgtgtaggaagcaggtggtgaggagagataatccctgtgtgtcctatcctgagggacctcatctctttagtatggggaggcaccctgacatgaggttccagaggagaggtactggggtctcagacattgtggcccagggctgaggaaaggctgacataagcacacagctctagactgagctgcacagcccaggctcaggatctggacacacacattaatttggggaatagaatcaaggcactctcaaggatagccagagctggtttgagctgaaacaggctgcatctattggctgtggcaggaaaggtgcttagctctgggtcctgcacagggaaatgcctttgggtgactgaagaaggcatgagctgtgcctccccatgcttcccagaggcacttggttcagcttcactgatggttcgtaaacaggtgatgtgtcctgcagaagaagactaaaacattcactgtgtagttgctctgtgccaaacccagcccgatctgcagctcagtctcgcagccactcagcaaggtaggcctctgccagcagcgcctgcctctcggctccagctgccagtgaggatttaaactgcaaacccgtattctcattctcctgactgcccccaccccctaacatgagctacaggtgggtgtgttctgggcactgtgccctggcatgcagagggaggcaggggatgggcaggcaagcatctcagagtatctgagacaggagaggttggagttgctggggtggcattttctgactgtcatgccctccctctccttatagtctctgcttcttgtcaccccacatttttgtaactcttaagagttctatgatatgataatttacaaaggggcagtcacagtggggagccaacaggctggggcttaggatttaggaggctcattcttactgtggaaacttgtgggattttgttaggagggtcacatggttctctgacattgccagtgtcaccatagattcttatcatctagatcaagttcagtatgctcttggaaagtcaacctttttgttattgaaaaatgagcaggtcacacaaatgtgcatgccagctgtctttaggtacacagaaccgtggcaatgagcacacacaggttgttggataacatcactaacacccatctctagaactgtctcattttctccagctgatactcagtgcaggccctggtgactaccactctcctcatttctatgcatttgaccattttaggctcctgtgctgacacccgtgtctgtgttatattctctcttctgagtgactgaagtgggtttctctgcctgcctgggccctacatggtgcatatccctcactggtacatgaaggtctcatgacaaggatgggaagaggtccagaaggatgcagagtctccctctcctttggaccctcatgcccgtgatgtggtccctcaggataggacacacaggagtgacctctccacacccttttcaccaacttttgtcatgggcttctttcacttagcataattttgaagcctcagccttgttgtaacatgtgtcggcctctccttttaaagactgaatacattccattatatggtgggccacacccatctgtccatccatccatccatccgtccatagacacgttgggtgctccagcctactgtctaatgtgttttcttagccagttgagactgtgtctctagatcctcatggatagccacctgatgtggaggtgtcccatgttggtgtacatgtgtgtgcactgtggatttacatgctatacttcttatatagatagcatccacacattcctcaaaacttcccaggtcatctcccttaaactcattgcccttccaatggctcttcttcagaagttcttgtctttttgtatatcccatgtgttacttacccttcccaacctcttttctcatcactcctgtgctccaaggcaaggggaacaacttctattccatcacccagaggggaagatttaatatggggaagcctgacagatatcatcccagatggggtggaagcactcaagctaactctgggtggttgccaagacttcagtgttggagggatgagtggaagaactggtcctagagtcaggaccatgtggcaagagctgcgatctcatagaggtgccatttcaaggatgctggcagcatgaaaaatccccagctacagccctccacagcagacttagagtgatagagaagtgcatggcttcttccctcttcaggggttagctcagcttctcactcatggttgtgagtgaaaggctactgagtctggggtgggagtctttctttttttctttcttggagcaggaatcagcatttcacaggggttagatgtagggcacactagctgagacttccattctcaaggacttgcctgccagcccctgctttgccctcatcaagtaccttactgtctgatagccatcttgtcattaagactccttgtttagaagccttttgtatctcctgtttcctaccaaacaggttgtctttcctctaggtctatagtcctttatgtgtctaacaccaggtcactgggccataatcaccaaatatgtttatacacatacatacatacatacatacatacatacatacacacatgtacacacatatgttttcacatatgtaggaacatatgtaattatgtgcatgtccacactcatacacaaatatacatatgcaccagtgtgcacccacacatttctggtgcctgtggtaattaaattcagaggcagagatgaatgtactctgtggcgacctatgaatcttgctaagactcaccaagaaagatcaataaatttgcctccttccttctaagctggcatagataactggagggatcaagggcagctcaagatgaaattctttgtatgcttccccattagctaggctcttgtgaggccaggaggtagggggccatcatgtgcctgcagacctgtaggatagggctggggcctggggtctacttggagcttccttgagcttcagttcttattacggtacccaagaaccctgctacaagccaggctatatcatggagccctgcctcagcttcccccgcactcttgcacagggccgagccccacaggtcagtgggttaaatgggatcaatgccatgtgtagcactgtgcctggcacacttgggttgagtgctatgactacttttttttttttttttttttgaacagagagttgtcagttgctgatggctgatgtatgtataaacgagtgtgtgtcccatagccgcagggttgctctgccagcctggtggggccagagaagtactcaaaatgctcatgccatttctcccagccctctggcagtctctgctttcgtttcttttagggatcaagcctgggaaatggaacctgtggcttaggtgacagggttggtagcatgagcagcttggcaggatgagaggtgaggcaggccagtcttagcaggtctctcttaatgggctacaactctgatgttccctctagcggggggatgcgcccgagtccttctgacggtcactggcacagcagagcagagcagagcagagcaggtattttacctacttgagggcctctgcctgtagcctccatgagggacctcacctgatgtaggagcaggagtggggttagggtttaggcagctttttctgcttcctgtctgggtgccattgagttagtcctttatttgtgcaatgaacacatcattatctgtagcacatgtgggggtctcatacacacctcattcctccattcactttgttgcattgtcacattgtgtgtacatgttacttattggagtgttcatagatggttttctcctccagggtttgcaaaggatggccaggccctggaatcctaaagtctctacctagccgatctcactattctaaccaatcactgtgccttgggcatggctgttctgggtgggcctcatttcccaccctgttaggataagggagtgattttgtaggctctgacatctctaagcatgtgtcttatgtagcagctgtgacgagaagctccttagagatgggtagtggggccttctccttgaattattcctcccttggagctgccgtatggaaatgaaccgataatggccaattctgtgtgcaaatcagcttcaggctcagcttagctgaacaggcttgctgcattctgcactataaatacctctcctggaactagggcagccctgagcatggccccagtgctgtacagctgccaggaatattctttcttctgtgaactccagcattttggctgttctgggggaccctcacatctcctggtctagttcagtgcttggtcagttgaatgcatttgttagttatcatcagatcctgggagaatgtactttgtaacaatgaatggtagttgagccccagggttctggtgtagactatctgaattcaaatctcaccagtctttgtgtgaatgtgaagttgggggatgtgctgaatcactctgtcttgggtggcctatgggcatccacaccacacccttctctgagatttggaagagctggccctgtgggagagcacttgacatgcagagaggacacagcccagcacacagaaggtgtgcatcagctctttgctcttgctgcccaatccattgtgtcagtagtgaaagttggcctcagcaaggtctagtgacttctctgaggtcacagaatcagcatgcagaacagatctcctgacaccaaaggtcatactttctttacagtagccttcacagatctgtgttctctgaggctttgttcctggaaaagtcaaagactgagaggcatttggagttgctctgggatgcccatcaagcctgtgtctcctgcttgtgcctgtaaaactaacccacacaaataggcgggtctattgggaggttggtctccatgcttcagtttacttccctctaaataagtcagttagacctgttgctctctatggcttcatgaacttctttgttctgtgtttgtgggtggctcatttcataccctgagaatgccactcagagatggggtaattgttggtcatagggatgggacgagacacttattgagcaattgatacataccagcattgagcttagtgtttgtaagtgaatctcattaaattgtcctaatagtccttaagtaattcttttggccccagtttctagatggggaagctgagatcagatagctacattattgaactacactaaggatacctgacatgaaggcaaagctgctgcttatgtagcttcaatgcattatcatttagaaaagcagaaagttctcaaatcagttcccttgtcacccacccaagaagctagaaaaatagataaaatgaaatccaaaataagaaagaacgggatgggaaacaataaaacagaacagagaaaagcaatacaaaaaaatgaaacccaaagctgttgtttgtgatgatagaattgataattctctagaccaatgaattagaagaaataaaactatccacccactcacccaccagtcaacagcaatgacctcgagagaagccagaaagctttacaacaagaaaggagagcattgacatctgtgcagatgtcattgacattagagacctaagagagggatattatgaaagccagtatgataactgaccttacaactagtctgaaattggcaaattccttgaaggttgtaagttgggaaaacatgctaaataggaaatagaaagcacgaatagttatattgctgttatagaaactggacacagagcttaaaataccttagaaagaaaacctcagaaccagatgggttcacagttgacctctgccatatgttttagaaactagttttactgacatcagacttctcttccagaatacttccccaaaagattcttgtgaggctcatgttatcccactgctgaaatggactaaaatattataaaaagtctaagctggtaagtatgtacatgtaaaatcttcaacaaaagattagtgataatctctaaacaggaaaaagcagactttgtccagggacacaaggatggtttgatattaaaaatcaaatcatgttgcctgaagattttatcgaaaggacccagatgtagctgtctcttgtgagactatgccggggcctagcaaacacagaagtggatgctcacagtcagctaatggatggatcacagggctcccaatggaggagctagagaaagtacccaaggagctaaagggatctgcaaccctataggtggaacaacattatgaactaaccagtaccccggagctcttgactctagctgcatatgtatcaaaagatggcctagtcggccatcactggaaagagaggcccattggacacgcaaactttatatgccccagtacaggggaacgccagggccaaaaagggggagtgggtggttaggggagtgggggtgggtgggtatggggggactttttggtagcattggaaatgtaaatgagctaaatacctaataaaaaatggaaaaaaaaaatcatgttgcctggtggtggtggtgcatgtctttaaatccagcattctggaggtaggtggcactcagttcaatttcagtgtggccccagaatgagttccaggacagccatagttatacagagaaaccctgttgtgcaccaccccctaaatatttagaatcattataccaacagatttgaacaacgtacatgtttatgttgtagcacaaagcatttgaaaagatccagtgtctcaggagaatagggcacagggagactcttcaatcaggaaaagagtgtctgtgacaacctagagctagtaccgtctatagtggggatatactgcataacttcccttcagggatcggaacctgaatgtatgtctactcttactgcatctatgaacattttgcagaatgtttaggcaaatcaagtaagaaaaagaaataaaataaaaaaaattaggaagcaaacctaagatgtttaatctactgatcatatgtattgaagttcagtgcgatctacaaaaaattattgggattaacaagtgaatttaataacattgcagtgtagaaattagtatttaaaagtcaagtgtggaagtatataaaaataaataaagaatactatctatagtagtgtaataatttgaactctggtaggttattgatgggtttgtaataggttcaacaaaaatcaacaggacccctgtatacatataaaactataaaacaaagctgaaattgaagatgcccaagtggagaggcacacagtgttcacagatccaaagactcattactgtttagatgccagctgtaccccaaatgaattttctcgatataatgcaatcccaggaaaccctaacatatgttttaaggggtggaaattgacaagctgactttaaacttcacacaaaagtctaaaacacatagaatagtcaagagcattttgaaaaacagtaatgaggcctaccattacatgactaggaaacactgaaatcctacaataatcaaactgctatggtataagcacagataagaatggctacagcagaataagcagtgcaaaatcaactcccacttacagggatgattgattttcaacagagttgtaaaggcaatcctgggaagaaagaagtcttgctgcaaatggtgcagaaacaactgagtgtctgtctgcaaggaaagatgcctcaatagccttgcactcaccagtgtaaactcaagactgtgaaaggactgggggaagacagaaggtagtgcttgtggtagaacagaaggcannnnnnnnnnnnnnnnnnnnnnnnnnnnnnnnnnnnnnnnnnnnnnnnnnnnnnnnnnnnnnnnnnnnnnnnnnnnnnnnnnnnnnnnnnnnnnnnnnnnnnnnnnnnnnnnnnnnatggaaggcagaggctgtgataggacagaaggcagaggctgtggtaggatggaaggcagaggctgtggtaggatggaaggcagtgcttgtgataggatggaaggcagaggctgtggtaggatggaaggcagaggctgtggtaggatggaaggcagaggctgtggtaggatggaaggcagtgcttgtgataggatggaaggcagaggctgtggtaggatggaaggcagaggctgtggtaggatggaaggcagtgcttgtggtagaacggaaggcagtgcttgtgatctgctgctaggcaaagacttgtcagaccaaacactaaaagcacaatacatgaaaggaaactaaagttcataaactagattgcactacagttaggagcttcaactcattaaaagatagtactaagagtataaaaagccccagactgagggaaaatatttacagatcacatatatgatagaggatgtgggatatattaataactcttaagattcaataacagcacaattaaaaatacatttgaacatttgaataaatactgcacccaaaaggatagatggatggcaaagaagctcatgaaaagatgtatattattattattattatcatcatcattattaggatgaaattaacactacaatgaaatgctactatattgctcctcaaattgctgaaataataaaaaaataataatggccgcgccaagtctacaacacaccgagcagctgtgggacaatcttaaattgtgctgttggtttgaaaaccaacaccaccactttggagcagtttggcagtttcttgaaaagttaaacacacacctgccacatgagtcattcggctcccaggtatttattcaggaggaatgcaagtataattcacacagagatgcatgtaagcagtagcttaacttgtaatacctctgacccgcagctcaagtatccagggacaagtgagtgggtagatgaactgaacatacctttatgatgggccaccactcagtgttacaatgtagtcagttatgaggacaggagcaacaggggtagtttacagaataattaggtagcatgaaagcagataggcaaagagtatacactctgcacttatagaaaactatggaatagcacagttatttaagaaatccatagtaatagatcggagattagtgcttgtttagggacaaggtagaacagaagagaaaagcagggacagaagaagactttgtgatgagtatattctctatcctgattgtagccattcatatgttaaaaatgtaatttactatatccattacacctcaggagaactgttacacaaacttcccagccttttctcagtatcaaactgcctgccacaggggctgtttctgtcctacagaaaagccatcgtgcttgggttcactcagacaattgctcaccccatgcagtttccagaggctccttagaggattggtgtttgtaacatccgtcacagatgggagccatgccagcatgcagaattcctgtcacacgctggagagagagggtggagcatctgggattatgttgtaagcaggagtcccaaatacaataagcaattcagctaatagtccttgacatgggctacaaaggaagctaagtgaatcgagatcttctcaatgctgacatcatggcttttaatctctgagttacagttttcttcctttatcacccatctgcattagagttgattggtaaatctctggccttcttggaagccatccagtggggacacattagtgggtgggttatggagcagtggtggggagaagtccatcaaatgggctcagacagcactgtaattagcatgccccagacaccagggtgctgtgctaggctggccttggctggtctcactgtggtgcagtttgttcttttctacaaagaacttcatttgtggcaatcaatgaggagcagtatggtggctcctccactgctgcctcatggtttcgtggcctagagcttctctttgcttcgggtgctaagttttccatgccagatttccaggggcagtgtgtgccatcctcagggcaaggtttcttggaaatgtccacagaccctggaactctgaagcacctagaatcttgtgtcacaaccatcaggaaggctgagcagccatggagaactgatgtcaggggcctgtataggaagatgaaaatggctgaatgtccttctggtgtccttcatcgcacttgacttgtgataatagcttctaaacacaagactaccaatctaaacacacaagactaccaatcaatatgctcaccacataagtgttcaacgcgtgccttctgaatgccagcctgaattctaggctgtgggagctcacacacagcaaagaaggaatacatgaggaagccaaccagacaaatattctaagtaatccactcttgacatgacttaatgtccttagtgcatatggctcccctttcattcaaaggttccataatagtacattgaaatggtgtgtgcatgtgtgtgtgtgtgtttctgtttcttaattaattttggaattaattaaggaataaaggaatgaatccagagcctcacaaatgctaggcaactactctgccattgggagatatcacagatcataggttctaattacatttgaaacatagtatagggcgttagagtctctctcttcacaaaaagtgatactgtcatatctccccaatcaggaccctgggcaaccttttggtcaccttagtctctgttctattcatcagtttgttgggatgaaggagaggaacaattgaggttatctttgcccacttgttggcctggtatctccaatggttctctccggtgtccttcatttgtagaagctgaaacttctcttgggatcattggctggtcctctcacctgaggataccacctagaatgcccttccctttgtccagccagtcctgccggccacagtctcctatattgcctttgtgcaggctgcaggagcagcaaaatttagtggtgcctgaggtccagaagtgtgactcaggtccccactgtggctctttctagatcctgtcaagctcctctgcctgtgttcctcatgggatctgggtgatgctgctcttagtcccctgcaggaaacagttgatgatggaatgggatccctcatgagaaggatcaggggatagcctttcattggtagccctttccattaatgattgtactgaatgtgtatgcagacacaaatgtactgttttgagccaaaggattctttgtagttggcaggcccagtatgaactatggtgccatagttcataaacattgtcctgtggtcagtgggagcagtggttcgaagatgcagggagaaggtgacttggggctccaccaaattagcttttgctaacagagtggttccatgtgactctccacttgccaattgtttgacctggaccagtaagggaaacactgtgtgctaaagctttgtcctctgcaatctggcaaggacttgacccactgctgaagtcattgtgagcctggaagggatcactgggcaatgtagtgataactgttcccctggattctagggtgaccagggaaggatggaggaggagagagagagaaggactaaggctggggcagactacatacaagataagcttggcccatgtgggtttttgtgtttatgtaggaagaaggaagcgttctttgaggatgtctatgctgtgggaggttctgctttgggatttctgctttctaaaggtttcacctatagactggaggtatccttatctgaggatgtgactccccaaggattccaacttatccttgcttcaggccaggctgagattgatgtggacctaactcccattggcccaaggagaaatgggttggcatggggcccttggataaaccaggcacacccttctgccatggctgtgtgcccaagagcatgttcctgactccactaagagaaaaaccgtatgtatgagagaaccttctacctatatctgggctaaaaggtaccatactagaggacgtgttctggggagaaactgccagttgggagacatgaaagaaaccagggctcctcagagttagacattactgataaggtttgtggtgggttccagagtttggaattcagggctgtgcagctgaaggagctcaaagttaactgtgtgcagaaccattggggaacatacagggcatgtgttggtcacctgcagctgttacattagctctgacctctgtggctgaagccctctatgatgcccctaacctcagtgaaatggcctgtggtcctgatgtggtggcatggagcagcccaagcattcttatctatggttcttgctggttgcccttacagctgccagtgatggtatgattgacttgtcttccatggcctcagcctcccctgcctttgctttcttccctttctgactcataagcagatgagtgggcagggaagtctagaggccacgagagaagggagtaagatgaagaggaaacagaagacataatcccccaatagataggagatttaaagtcatccgatgggcatttcagagatgtgatttttatgagttggtcactaggggaactggtgacctgatttttgtcacgtggaaaactgctttggagactattgtatctaaaggcgtggttttctatgtggtaaagagagaactgactcccataagttgtcatctgaccttcacattgtcttggttactgccctgttgctgtgaagatataccatgaccaaggcaatgtaagaaagaaaacatttcaccgggagtcttgctaatagtttcagagggtgagtccatggctgtaactgtggggaggctgacagtagacagaagggaggctaccaggtgctagagcagcaagtaagagctaacatttgatcctcaagcaggaagtgtagaaagtgagactgggccttgaatggacttgtgacaactcagagcccatcctgactgacacacctccttcagcaatgatctatctcccaatccttctgcaaacagtctaccagctggaaaacaagattttatggggaccattgtcatctaaatcactacaaacattcacacacatacatagctgtatacattcagaaataaataaataaatacatacatacataaataaataattaaatcttgcccatataattagcatcagagcatcagtttaattctcctacctcagtcttccaagtcctaggattaaccatgacagacaaattaacttaatctttgaagtgaaacttcaatacagaggattccaggaagccagctgcctcctcacttgaaaattcacacgtcacccactgtgcccagcaaggctgtgactcagattcctccttggaaagggtgtagcactcatcactgctggactggacctcttcctctttctcagtctctctcgtacactgtgcatctctacatgtctcgttggctctctctctctctgtctctctgtctctctgtctctctttatctctgtctgtctgtctgtctgtctctgtctctctctgtgtctctatctctctgtctctctctctctcattgacctgttcttatacacacagacacagccattgtctctgtatcacattcacacacatgcacacaaacatgataaggacatagagtttgcctcttacgtacacatcctccaccttccagagaggaaaatccagtgttaggtgaatgggcaggctagttgtatgtcagcttgttaacgacatctggaaggagggaatcccaattgaaaaaatgtctctataagatnnnnnnnnnnnnnnnnnnnnnnnnnnnnnnnnnnnnnnnnnnnnnnnnnnnnnnnnnnnnnnnnnnnnnnnnnnnnnnnnnnnnnnnnnnnnnnnnnnnnnnnnnnnnnnnnnnnnnnnnnnnnnnnnnnnnnnnnnnnnnnnnnnnnnnnnnnnnnnnnnnnnnnnnnnnnnnnnnnnnnnnnnnnnnnnnnnnnnnnnnnnnnnnnnnnnnnnnnnnnnnnnnnnnnnnnnnnnnnnnnnnnnnnnnnnnnnnnnnnnnnnnnnnnnnnnnnnnnnnnnnnnnnnnnnnnnnnnnnnnnnnnnnnnnnnnnnnnnnnnnnnnnnnnnnnnnnnnnnnnnnnnnnnnnnnnnnnnnnnnnnnnnnnnnnnnnnnnnnnnnnnnnnnnnnnnnnnnnnnnnnnnnnnnnnnnnnnnnnnnnnnnnnnnnnnnnnnnnnnnnnnnnnnnnnnnnnnnnnnnnnnnnnnnnnnnnnnnnnnnnnnnnnnnnnnnnnnnnnnnnnnnnnnnnnnnnnnnnnnnnnnnnnnnnnnnnnnnnnnnnnnnnnnnnnnnnnnnnnnnnnnnnnnnnnnnnnnnnnnnnnnnnnnnnnnnnnnnnnnnnnnnnnnnnnnnnnnnnnnnnnnnnnnnnnnnnnnnnnnnnnnnnnnnnnnnnnnnnnnnnnnnnnnnnnnnnnnnnnnnnnnnnnnnnnnnnnnnnnnnnnnnnnnnnnnnnnnnnnnnnnnnnnnnnnnnnnnnnnnnnnnnnnnnnnnnnnnnnnnnnnnnnnnnnnnnnnnnnnnnnnnnnnnnnnnnnnnnnnnnnnnnnnnnnnnnnnnnnnnnnnnnnnnnnnnnnnnnnnnnnnnnnnnnnnnnnnnnnnnnnnnnnnnnnnnnnnnnnnnnnnnnnnnnnnnnnnnnnnnnnnnnnnnnnnnnnnnnnnnnnnnnnnnnnnnnnnnnnnnnnnnnnnnnnnnnnnnnnnnnnnnnnnnnnnnnnnnnnnnnnnnnnnnnnnnnnnnnnnnnnnnnnnnnnnnnnnnnnnnnnnnnnnnnnnnnnnnnnnnnnnnnnnnnnnnnnnnnnnnnnnnnnnnnnnnnnnnnnnnnnnnnnnnnnnnnnnnnnnnnnnnnnnnnnnnnnnnnnnnnnnnnnnnnnnnnnnnnnnnnnnnnnnnnnnnnnnnnnnnnnnnnnnnnnnnnnnnnnnnnnnnnnnnnnnnnnnnnnnnnnnnnnnnnnnnnnnnnnnnnnnnnnnnnnnnnnnnnnnnnnnnnnnnnnnnnnnnnnnnnnnnnnnnnnnnnnnnnnnnnnnnnnnnnnnnnnnnnnnnnnnnnnnnnnnnnnnnnnnnnnnnnnnnnnnnnnnnnnnnnnnnnnnnnnnnnnnnnnnnnnnnnnnnnnnnnnnnnnnnnnnnnnnnnnnnnnnnnnnnnnnnnnnnnnnnnnnnnnnnnnnnnnnnnnnnnnnnnnnnnnnnnnnnnnnnnnnnnnnnnnnnnnnnnnnnnnnnnnnnnnnnnnnnnnnnnnnnnnnnnnnnnnnnnnnnnnnnnnnnnnnnnnnnnnnnnnnnnnnnnnnnnnnnnnnnnnnnnnnnnnnnnnnnnnnnnnnnnnnnnnnnnnnnnnnnnnnnnnnnnnnnnnnnnnnnnnnnnnnnnnnnnnnnnnnnnnnnnnnnnnnnnnnnnnnnnnnnnnnnnnnnnnnnnnnnnnnnnnnnnnnnnnnnnnnnnnnnnnnnnnnnnnnnnnnnnnnnnnnnnnnnnnnnnnnnnnnnnnnnnnnnnnnnnnnnnnnnnnnnnnnnnnnnnnnnnnnnnnnnnnnnnnnnnnnnnnnnnnnnnnnnnnnnnnnnnnnnnnnnnnnnnnnnnnnnnnnnnnnnnnnnnnnnnnnnnnnnnnnnnnnnnnnnnnnnnnnnnnnnnnnnnnnnnnnnnnnnnnnnnnnnnnnnnnnnnnnnnnnnnnnnnnnnnnnnnnnnnnnnnnnnnnnnnnnnnnnnnnnnnnnnnnnnnnnnnnnnnnnnnnnnnnnnnnnnnnnnnnnnnnnnnnnnnnnnnnnnnnnnnnnnnnnnnnnnnnnnnnnnnnnnnnnnnnnnnnnnnnnnnnnnnnnnnnnnnnnnnnnnnnnnnnnnnnnnnnnnnnnnnnnnnnnnnnnnnnnnnnnnnnnnnnnnnnnnnnnnnnnnnnnnnnnnnnnnnnnnnnnnnnnnnnnnnnnnnnnnnnnnnnnnnnnnnnnnnnnnnnnnnnnnnnnnnnnnnnnnnnnnnnnnnnnnnnnnnnnnnnnnnnnnnnnnnnnnnnnnnnnnnnnnnnnnnnnnnnnnnnnnnnnnnnnnnnnnnnnnnnnnnnnnnnnnnnnnnnnnnnnnnnnnnnnnnnnnnnnnnnnnnnnnnnnnnnnnnnnnnnnnnnnnnnnnnnnnnnnnnnnnnnnnnnnnnnnnnnnnnnnnnnnnnnnnnnnnnnnnnnnnnnnnnnnnnnnnnnnnnnnnnnnnnnnnnnnnnnnnnnnnnnnnnnnnnnnnnnnnnnnnnnnnnnnnnnnnnnnnnnnnnnnnnnnnnnnnnnnnnnnnnnnnnnnnnnnnnnnnnnnnnnnnnnnnnnnnnnnnnnnnnnnnnnnnnnnnnnnnnnnnnnnnnnnnnnnnnnnnnnnnnnnnnnnnnnnnnnnnnnnnnnnnnnnnnnnnnnnnnnnnnnnnnnnnnnnnnnnnnnnnnnnnnnnnnnnnnnnnnnnnnnnnnnnnnnnnnnnnnnnnnnnnnnnnnnnnnnnnnnnnnnnnnnnnnnnnnnnnnnnnnnnnnnnnnnnnnnnnnnnnnnnnnnnnnnnnnnnnnnnnnnnnnnnnnnnnnnnnnnnnnnnnnnnnnnnnnnnnnnnnnnnnnnnnnnnnnnnnnnnnnnnnnnnnnnnnnnnnnnnnnnnnnnnnnnnnnnnnnnnnnnnnnnnnnnnnnnnnnnnnnnnnnnnnnnnnnnnnnnnnnnnnnnnnnnnnnnnnnnnnnnnnnnnnnnnnnnnnnnnnnnnnnnnnnntgtgtgtgtgtgtgtgtgtgtgtgtgtgtatgtgtgtgtgtgtgtgtgtgtgtgtgtgtgtgtgtgtgtgtgtgtgtgttggtttagatacaggattgacctgtgatgaggagtatgtgtgcgtgcgtgtctgtctgtccgtctgtctgtccgtctgtctgtctatccctggtggtttagatacaggattaacctgtaatcaccatgccagaagaaagcctaggaatcttttatcttatttcatcttcatagcaacctgtgagatagaaattaccactccatttacaagttaagaaaccaaggaacagaaactttgagcagcttgatcaacatcacacaggtgattttaattaaaaatggtacaggggtcagagctgccctggtatcaaagccccccgaggttctagaactttcactgacgaccatcaagctcttggcttttgttagggtatctaaaggtacaaatgccatcatttgtggacaaagtgaaagccacccctcacagctccaagtggtgcaagggggtagtggctgggtgaagggggcagggaggggtggtatcctggtgtctgagggcagtaggcagagtgaggggtgttatgggcgtcgatactctccacaggaattgattatatcaatatataatcaatttttgtggctaagcatgttcagcatttgcctgtagttgcttgcctatttactagctagtatgtgtatgtgtgtgtnnnnnnnnnnnnnnnnnnnnnnnnnnnnnnnnnnnnnnnnnnnnnnnnnnnnnnnnnnnnnnnnnnnnnnnnnnnnnnnnnnnnnnnnnnnnnnnnnnnnnnnnnnnnnnnnnnnnnnnnnnnnnnnnnnnnnnnnnnnnnnnnnnnnnnnnnnnnnnnnnnnnnnnnnnnnnnnnnnnnnnnnnnnnnnnnnnnnnnnnnnnnnnnnnnnnnnnnnnnnnnnnnnnnnnnnnnnnnnnnnnnnnnnnnnnnnnnnnnnnnnnnnnnnnnnnnnnnnnnnnnnnnnnnnnnnnnnnnnnnnnnnnnnnnnnnnnnnnnnnnnnnnnnnnnnnnnnnnnnnnnnnnnnnnnnnnnnnnnnnnnnnnnnnnnnnnnnnnnnnnnnnnnnnnnnnnnnnnnnnnnnnnnnnnnnnnnnnnnnnnnnnnnnnnnnnnnnnnnnnnnnnnnnnnnnnnnnnnnnnnnnnnnnnnnnnnnnnnnnnnnnnnnnnnnnnnnnnnnnnnnnnnnnnnnnnnnnnnnnnnnnnnnnnnnnnnnnnnnnnnnnnnnnnnnnnnnnnnnnnnnnnnnnnnnnnnnnnnnnnnnnnnnnnnnnagagagagagagagagagagagagcagactgtacttagagatgatcccgttgtatctgttcacacctatgcctgcgaccaccgatgtagctgtgtctgacctgcgctgtgcacaggttttgatttgttcttcatgcgatgctctcatctgaccacacttaaccgtgctttgcctccctttctctgcccccaacccctttctttttctttttctttttctttttctttttctttttctttttctttttctttttctctttctttttctttttcttcttcttcttttttttttttctctcttgtaaggaaagtagaggaactggccctcaaggaataaggaagtgagaaatagaggatcatgcagagagagagaaagagagagagagagagagcacctgaagctcttattataaatacccttatttgtcccatatttgcacctttttctattcccatatctttctttctgacctactcttatgctgagagctgcacctgaatttatactcatgcctattctgtctgtctgtctgtctgtctgtgtgagcttggtgtgcatatatgtgcccatgcacatgtgtgtactgtgcaggccagaagacaatgtcagattccctggagctggaattataggtaaccatgagccattggctgtgggtgctgggactggaactccagtcctctgaaagagcagcaagtactttaaaccaccgagtcttctctacagcccctcccccaacctattcttaaactgcatgtatatctgtctctctttccatcacacatcacaggcatataaccccttcatatagtaccccccgccccctttctttttttttctttttctttttcttttttttttttggtttttcgagacagggtttctctgtatagtcttggctgtcctggaactcactctgtagaccaggctggccttgaactcagaaatctgcctgcctctgcctctcaagtgctgggattaaaggcatgcgccaccacacccggctcattgaacaccttgataatctaacgtcccttgaaaccttggtctgctgccttggagttcaaaataggagacagaagagagaagtacagatgtataatgtcttatgagacaaacaattgcctatatacatgggctttattaggatcatcattttatgaaaacctactaaaaacctcatttatgagacaataaatcttataatcttgggaatgcaagtattgaccagacgggcagatgttaagggacttgcttttaaaggtgctttcattgtatcatgctctatggtaaaacaggaagtcttgacctgtagctgcactcacagtgctatgtgtgacagacacgctgctgtagttctttcaggagagctcctggtgtggtaagtgccaggtagggagagctgctgttggccaaggaatgcacaggtctacggcgatccccaaaagactgaatcttattcaatcagaactaaaattaatggtgggagtattgtttattttttaattttaggttttctgccttactttttgtggaatcttatgtgccgtcacttgctagcgagtggggggagcagatggcagaatggatggataagtaatgagcagatattaataagagaggaaactatcaattgggcttcctggacagcttgcttttatccctgcatacttctgcaaaattatattcaagcaatgtattcatttttttttctagaaatgattcatagcaggagattaaatgggacagtacttagtgataagcttatagaggcttctgctgggctctggaggctgactgtctggctctgcacttagtgatcttctgagcttgagcaaaatttgaattaaaacggcacctatcattcaggcacctgaatgaagatagcacctactgtgtgcttgaggaaaggaatagtattcagccactaaaaggatggagtactggcacaagctatagtgtggacggattctcaaacatcttgctgagggaaaagtgccagataggaaaggccacaggattatgtttaatgagttctctgggatacacgagctctcagggacagaatatggctgccagaaacttggggtagtttgggtgccaggacatgcaagggcaggtgctaatggacgtgatatttcttttgtggatcatagcgtactctaaagccagactgaggcggtggcagcatgatcttagctatgttaaattagtatacttaaacgtcagagtgagttttgtggcaggtccaccgtagctcaataaaagtgaagannnnnnnnnnnnnnnnnnnntcttttgtagtagtgcacatggcttttttttttttttttttttttggctctagggggagcaggaaggtttgttctggagataggctagctcagatgcaggagcaggtctgctcattatagcaggtgtctggggagcttccagtttggaggggcctctagaagtaggtactggtacagtgttctttccctggatttcaaactatattcaggtgggtggggctgctatttagctcactttttgggaagatagcctctagacttggggctggtttctgagacagcttggaatttgggttgactttgtgtgactgtaatgcagaagtaccggtctagaccttttctgtgcatcccctggagggattgtgtgctcctccgacttgctctagcccccagcccttgccaggtatcctgtctgtattgccattggagggctgtagctttggctcccacctggatttctctcatcagcatctcctctacacctttgtgatggatctggtcttgcatggatgctcctggtaggggtggactgaaacttgcttatactggctacctttatatctctaggcttagccaaagttactttgctagaagcatttataccaaggagattgtcaaatactataaaccagggctttactcactttttcttccagagagcctgtttctaagctgcatccacgacaccactgtggggctgcagaatgtctccacaggcctggccgtgcttgttctctacccatcagcccagggtcactgtcatccagctggatcagagaaatcgtacaagaggctgtggtaccccatttggtctcctgcagtcagatccttggtctagatgtgagactttgttgtaggcatgcctagcttctactctggtcctgaattagcctggactattgcatcagtcccccttcctgtcagacctattgtctttcagctccctgcagtgcctggatcctcatcagcttcatgccttctcaaggaggcatttgaacatagagctgagagtcttgctgttgccagcagcctgtgttaccctgcatagtctgtgttctccttcctgctgcccctgtcccttctctcagatgtatccctcccaagttccctttgatccatcccataaagataagggacagggttagaaggtctttatggagtaattcagtcttctttgtgttgctataacaaaaatacacaaggctgggtaacatatttttttaaaaaggttatttagtgtacagtttggaggttaaaagtccacaatcaggtgggcacctggtaccctctggtgcgcacattctggtttcattacccaaggtagggaattcatgtcggtacgagtaaccaagcatttggagcgctcttcctttataactactgtttccttggaactaattgggtcttgagggaactacatttatctttcaggtatgactatcccatgccttaactgtcttctactgtgtgaaatctttcacttctgaatattgttacagtggacactacacttctaacttgtgggcctttgggggtcacattcaaagcacagagacagatatttaataatgcaaatgtatgtttgaatatatgagcatgtctcagtgttgtaagcaaagtgggtgtgtgtacatgcatgtttatgtgtgtgtgcgcgagcgcatgtgcctatatatgtgagtgcatgtatatgtgtgcttttccaattgcctttcatggtggtgctctctgacagactcagacctgaagcaccagaggaaggatagcttcacagagcatggtggatgcttggctcagaatccttccacaccatgcagagggattttactcctgattaaccccagattcaccatcaactgtagtacccaggacagttggaatggccatttatttttacaagatggcgcaggggcttgtgggagatccctgagctctggagtgagggagtcttctctgagtgacattttagctttcaggtattttcccctctgggttggggaatgccacccctcctttaccttcctgcagtgtccaagatcccttggtttagtagaagggagagtctgtgggaatacccatagatttccccgcataaaggctggagagttctgagtctgatgtatgagatgctaaaactggggcctggtccaggattgcttctgggtagtgagaggtactagataaagagcagcagtctgctctgctctaatgatgaagctagacacagaggtggtacaccaggaatggagacacagctacagggactgatggggactgtaccttgatcctgtaaaatccttggcttggaagaatatgcgtaggactttgtttctatctaaacttatatgtcaggtaggccagcttctcctggggcactaggagttgtgttgtcctggtggcaagtactgctaggacactaggcatagcactgagtgattttattcatttttcccaagccttagctatctcaggcaaaatgggatagcaatacagaccttacagcattcctatgaggaccgtgtgagaggacatctgtaaagcatcattaagccggaccctgaggttcagttaatggtagtaagatgacagtgacaaagaggactgctgagaatgacagagctcatattaaggaggcttagcacaggccacatttattccacagttagcttaggcataatgaaccgtgaaacatcttcctgtgtctacagccttctagcttctcccccctccctctgctctaatgtccaatcagcacaactctagcctcatttgaggaggggacggcgttctacacaggaattcaaggccacttgccttgatctcagccatgtctctagcatttgtccaacccctacttcaaagctaacttccatccacatctccagctgcagtcttacttaaatctaatctggactcggaaatggctgctgttctattgatccttctcttttgtataccacaccatcctccttgacttgtgggttcccatagtaactggtctttaccactgttcccacattgggtcctgatgctcacccctgggctggctgtctccaggacaccagccaacagcactgttttacctgtgggtcccacctgtgaactcccagtttccagtcctttggtctggcctcagctttgtccttcccacacaaaagggtctattaggtaggcatcttccctcagaaggcttgagcctgggcaattggacaacctgcaggtgctttcaatgactggtcctcttgagtctgattcttcaccacctccctccccaccttatgcccaccccagcccatcaggatgtaacagaagggaggagggagtttgcattgagggcaaagccctgggaccacagaatctttcccttctgttggacatagctgagactggtaggaaccctgattggttgttctgtggtctttcatcttgtcaggtgcacatcctgccttggtggagcagtgtgcaaggtgagatccatttgcttgactcccccagtttcttctcagccctttgtactcatttctgcccactattctttgtcccatctccctggctcttggatacccatgttgcatctatgagtgtctctagactgctttaacatggtttatgcctctgatgggaagggagatgggccccatattaacctttattctctgcttctggagcccctgagggaagggctgaataaaggctgggatggaattggaagggaagggtgcacggattcactcaggtccttcaggaacccaagcttccagcctctcttcttgcccttgtctctacttggatgctgtcccttacacacacccgtgaataccttttgcaatcctcagtttaaagtcaggattttggaagctcttcttgtcattataaccagcagtaccctgcccttgtttagttgtcaattacccattggttatacagttattggctcatggcacatctgtcctcacactgttgcgtgaatacaggtttatcttaccgtgtccatcagtattcagaaagttgcttggagtagtgtccatatgtgaatgaaagaatgtgaggctgaagctgggagcagaagtcagggcttcagggctagactttcatgctgaccatgtcctgcagagctgcttgcctgagcatatccatgtgggatccagcgtctctccccacctccacctccctggtctgagttccttcttcccagttcccaggctatgtttcaggtcgttgggctggagcctcccccagattttgtcctttaaaactcattgatttttgtgctgacttttacagtacaaatgtcatcgttagataaaataattgaagcgggtaatctactcactgcgcccttctggtcccattgccttgcccaaccctgtagctcatgtgagcactaggagggtttatgtggccagtgattgccacctgggccccaggggctggctggccagagcaagcaggtctaggtagaggagggattccaggatgaggagtcgtctttgtctccctggaagcttccagcaggcaacatgaacaggtgagaacccagggaacagaaatggcacctccccttcctcagacatgcagttccccagagagattaattaagagactactaacaggaacatgcccccatgttccctgccacaaaccagagccttcactgtcgctagctgacctgagttccccaaatgcatctcttatttgtgattctgggcctgagggctatcagagtccagttgcagggaccaaggtctctctgctcctgacccctgctctgtgtgtgccattgttctgtctccatgccagacttaccagctgaaaggtgaattgaggctcttgaagaaacatgctgaaaaggttctgtcctgacccaggctcagggttagctctccttcacagtcctctggctgtctctgcttgagtcccagggaaacatgggcctctgagagcctacgaggctaagatgaatgggaccacccaggctcagcacagccatggggcttgaaagccagtgctaagaatccctatcatttggagtacaggggaacgccagggccaaaaagtgggaatgggtgggtagggaagtgcgggggagggtgtggggggcttttgggatagcattggaaatgtaattgaggaaaatacgtaataaaaaatattaaagaaaaaaaaaaaaagaatccctatcatttggagtggcatcttccagcccagagccagaaagggaatgaataaaggccactcgtcgtgagtctcaggcttcctgtcctccttggcctctatgccgatgtgctacttaggctatgcttctccagcatgataactcttgaggcattagtctgggaaccatggaaggctcatacccacaatgtgggtcagtcacactctttgtaccctgccaggacacctatctgggagggagatccacacattagaacctaatggtggtagcccatctcagccattacctgcaacctatttctagggaaaaatatgtaggatgaattatatttgtgtcccgtagtgtatctaaggcagcaccttggcctcagctgcccctggttccgcactggtacagtaccagaaaggtctctgccttctggacaagctactaccctttatctaccactttgctgcccctcccccattttctctccccaggaagcagtgcatcagagattctgtcagctctatcaggagtagggccaatcaacaagccgtgggccagttggggctggttgctctatgaggaggtcaagggcaaatgtcagaagtatttgattttcatcacataggtctaaggtgcccatctatgggctccccagttgtcaggatgaacttggaggaagaatggacatatatctcactattaggaagggagggcttgcaccatctcttttatactcatggtatgtagtaaattccaggtagggagagctgcttttgcatctcttctctggtgttatcctagctttgtcttgcccatgtgtctcattgcacacttgctaagtctgattttggggctggagatgttttctcctttggaggttgacctcatcactccatatctgtcccctgatctgcccagcgaagttagcctccaggggacacatataatactgggggggggtgggtagttagctgttctttgctccttgcttccttactgacccttcataggccaaggaagggacacttagcatagggaagtcaggggcctcagtcgccataatgtagagatgtaagaattcagtgaatggctatgcaggcaggtgtacttggtacaaccattacctgtattttgcctgtccctgattctggcacaagccgtccaggtgggtgtagttccattcctgctttcttctcccatcatgttccaacaccatctgagcagagagcccttcctactatcttcacccattcttgtcttttttagcacaggtgggggaggggggaatggcgccgtggcaagtcaggggcttctttgcagctacttgtctgacaaatggttgcacaaagtattctcacatgtccagtaacacacatcagacccgtccagatcctggcagaagagatctttgtctgtgtatggaagtgtggcctgactcttctcatgcataggcgacttcttgtttctgaggattaaatctgtagaattggaaagagaaattggatttgagtggttcttcatcttacccaaggaagctcctgaaacataaaacaaaaccaaataagataaaacagaacattggtgggtgtgaggtcccgtgataaagctcttggtcctgtagcctccctcccctccccactttaagggatgtattttggtagtgggtagggagaggtgcaaggctccttttctgggtcttggaggaggatggaattcttggacctaacaagggacctgtcatttcaccctgttcctgccttgtgataaccacattctctttctttagcctgccctggggcttactgctgagaatagcacccactcaaggatcctggagtccagagacccctgtactgtatgttgctgtcaccagtacacaactgttgtttaacaccccactcacatgtcctgtctcaggcccacggctggatgtatggtttccatcatttagagcagacccagctgcagctagctgctctgagcccttcctaggggactgctggcattttctttctctgaacaaagtgtgacaattgaagttcgtgcaaaataaaacacacttgtttttctgtcttctctattgatttgggtttagcaggaagaggttggatgtaatttttgtttgattttcctcctggttttctactggatagagatgttctcatcaattcttcccatccccggccctccaggtgatccggctcctttgtggtcactccacccccggctggccagtcacgtggtgctggcaattcagccagcaaattattgctgctccccatgctttagaagccctgccaaaaacaaggatgaggacagcatggctctgagctctgtagcatcctgggaaagatactatgattgatgagaggcaagccttccaggggactcctcaaggatccacaccctagggatggccttgtcaggtttccagcccgagccctggaagctttctcaaccaaggctcttcctatggctccctgttccctgtatatatatatatacaagttgtcccctgtcaagttactagtaagagtagagcttagtaataaaccctggctgacttacccactatgcaatcctacctttctcccaagcacagtgagtagccacactcagcaagagtatatcttgtgtggcagacaaatctctaggacaactctgtctaaccaaactataacatgaatcacacgtgtaatttaaaatttaaagtaaaaaggaacaggtggaattaatttagtatatttaattttagctcattattgtcatttgaacatgaaattaaagttaaaaatgaaatatttggcattctttgttttataataagcctttgaaattcaacatccattttgtgcacatagcctatcacaactcaattatctctagtgtagaagcttggctgctgccctggacagtgtggagaccacttgtcctctgtgttctcagcgggtacagccagatttcaggcaccgagttgattcctatctctcaaatactcactccttagcggaatctccatcatnnnnnnnnnnnnnnnnnnnntctcatggtctcaaacccctgtcccctagtgagcttcatcaatactagttcttcttgtacttggttgtccagactcagcttcttctaccaagtcacttcacccaagtgtcacgattctgtttagttttaggccactatctcatgagccttcagaaattccaagctacctgagcctgctaagatgctacttccaaactttccttctagacagtccctgttctcggttcattttctcatgccagcacctactcctagaagtgtgactcataccctggttctttgcagtcctaggctttggtggccaagaggaatggacttttatgtggctttgttttgtggattttactttgtgattgctgatagtgtcagctgacaggtgggagaccttggactcagcttttcctgagagtcagcggggcagacactttttaactagaagacccttgttcttgggcatttatggagtacggttccaagccaatgtacaaatggatataagctttcattcccaaagaagaggctttgtttctcatgtgctcagtctctgctgacagtgggctataccactcttaaggaaccgtatttgagtctgaatccctagactccacagctcactttaccgcttacactctgagaacccttggcggggcacttcacccctctgagctctcagacatagatctgtgaagatggggatatttattcccatctgaaagaattgtcgtgaattctaaatgtatatagtatatggcttgtggtacatagaagggctgtggtacttgctgtaacactagagtttgctaaaaatgattgtcactgcttagcacatctgggcaggaacttgggcctgcaatggtgaccacatgcaggtagctgactcctgatgtctcaacctcctaatgttttgttaatcaggcatcaagcccttcccttcaagtgctagaagtcatccactgagctttcttcctctttgtgtgattaagtaaagttaatatcattgaacctgaagacatttaaaagtatcgattggtctgtgtgttgcaggagcagggggtgttgggaagtagatactgaatgaggaaggacaaaaatagggggcctggatggaaaaatgtatggtttggagggctcagtacagaagagtaaaggcacagaagggacaatgaaaggaccatgcatcttaggattcatcatggggttagcaagactgaatatacaagcatgtgccttagatggtctgactatagaaatcagacccaccctggcctaatctcccagtgcagggatttggtgcccagagatatagactggacaagagatttgtctatggagatgatgctgattataatggtggtgaatattattatgatggtgttggtaatgatgagggttgtgctgtttgtggtagtggtagctagtgtcatatgctgaataattatctaccgggttgaatagtctaatttatctaactgtcataagaattccatgaatctagcactgtcatcatctctgtcttacattggacaatttgctgagttctgccccccccacccccaggggggaataaaaggggcagtgaggctcagcaagttgtcccctgtcaagttactagtaagagtagagcttagtaataaaccctggctgacttacccactatgcaatcctacctttctcccaagcacagtgagtagccacactcagcaagagtatatcttgtgtggcagacaaatctctaggacaactctgtctaaccaaactataacatgaatcacacgtgtaatttaaaatttaaagtaaaaaggaacaggtggaattaatttagtatatttaattttagctcattattgtcatttgaacatgaaattaaagttaaaaatgaaatatttggcattctttgttttataataagcctttgaaattcaacatccattttgtgcacatagcctatcccaactcaattatctctagtgtagaagcttggctgctgccctggacagtgtggagaccacttgtcctctgtgttctcagcgggtacagccagatttcaggcaccgagttgattcctatctctcaaatactcactccttagcggaatctccatcatctcccgtatgagtctcagtttgaccctgtgatatttcttgtgtcttctgtccatctatgactgttcacaggctcctctgagtccagnnnnnnnnnnnnnnnnnnnntacccactatgcaatcctacctttctcccaagcacagtgagtagccacactcagcaagaagtatatcttgtgtggcagacaaatctctaggacaactctgtctaaccaaactataacatgaatcacacgtgtaatttaaaatttaaagtaaaaaggaacaggtggaattaatttagtatatttaattttagctcattattgtcatttgaacatgaaattaaagttaaaaatgaaatatttggcattctttgttttataataagcctttgaaattcaacatccattttgtgcacatagcctatcccaactcaattatctctagtgtagaagcttggctgctgccctggacagtgtggagaccacttgtcctctgtgttctcagcgggtacagccagatttcaggcaccgagttgattcctatctctcaaatactcactccttagcggaatctccatcatctcccgtatgagtctcagtttgaccctgtgatatttcttgtgtcttctgtccatctatgactgttcacaggctcctctgagtccaggaactttaagatggggctggagatgtcccatgggacagagggtatttgaaaaggtcagaaatcagggtatttgtgagaggcatcataggacaggggcacattggctacttcctaaggggaaaggtcaggaggtgtgtgaattttaaatggccaattccaccgatggtctctgcagctggtttccattgagttgttatacatatatgtgacattgttcactaaccctatgtgttgttagaattttctccctgggggagactgagaaatgtctacccatcactcctaaggacctaatagctaattaaagcttaagtctaagtggattaaagaactccacataaaaccagagacactaaaactaatagaagagaaagtggggaagagcctcaaagatatgggcacaggggaaagattcctgaacagaacagcaatggcttgtgctgtaagatcaagaatggacaaatgggacctcataaaattgcaaagcttctgtaaggcaaaggacactgtcaataagaccaaaaggcaaccaacagattgggaaaagatcttcaccaatcctaaatctgataggggggctaatatccaattcatataaacaactcaagaagttgtactccagaaaaccaaataaccctattaaaaatggggtacagagctaaacaaagaattctcaactaaggaataccgaatggctgagaagcacctgaaaaaatgttcaacatccttaatcatcagggaaatgcaaatcaaaacaaccctgagattccacctcacaccagtcagaatggctaagataaaaaactcaggtgacagcaaatgatggcaaggatgtggagaaagaggaacactcttccattgctggtgggactgcaagttgatacaaccactctagaaatcagtttggcggttcttcagaaagttggacatagttctaccagaagatccagcaataccactcctgagtatatacccagaagatgctccaacatgtaataaggacacatgctccactatgttcatagcagccttatttataatagccagaagatggaaagaacccagatgtcccccagcagaggaatggatacagaaaatctggtacatttacacaattacacaactcagctattaaaaacaatgagtttatgacattcttagacaaatggatggatctggaggataacatctttttttttctttccattttttattaggtatttagctcatttacatttccaatgctataccaaaagtcccccatacccacccacccccactcccctacccgcccactccccctttttggccctggcgttcccctgttctggggcatataaagtttgtgtgtccaatgggcctctctttccagtgatggccgactaggccatcttttgatacataggataacatcttgagtgaggtaacccaatcacagaagaacacacatgatatgcattcactgataagtggatattagcccagaagctcagaatccttcttagaaggaggaacaaaatacccatggaaggagttacagagacaaagttcagagcagagacagaaggaaccattcagagactgccccaccaaacccaggagttgatatagctgtctcctgagggcatttgtcagtgcctggcaaatacagaagtggaggctcacaatcaatccattgggcagagctcatggtccccaatgaaggagctagagaaagtacctaaggagctgaaggggtctgaagccccataggaggaatatcaatatgaactaatcagtacccccagagctccttgcaactaaaccaccaatcaaagaaaacacatggtggaacatgtggctctagctgtatatgtagcagagggtggcctagtcggtaatccatgggaggaaaggccctaggtcctgtgaaggctctatgccccagtataggggaatgccaggactgggaatgggagtgggtgggttggggagcaaggagagggggaaggggataggggattttcagaggggaaactaggaaaggggataacatttgaaatgtaaataaagaaaatatctaataaaaaaagaaaagaaaagaaaagaaaaagttcaattccatcagagtttatcttgagcaacagatgattttatttggcttatggagcataggtgaggggctatgaaaaggagcaaggggcccctaaagtacctctactggaaggtctgtacttagcatggattatatcttctgcatggctatgcagagagagcccccttctccctatatttccccagttcatgagacctctctgagaccctgagatcatatatgattagggcagaattgtatacagtgggctaggtggagtagctgtttattcaggtaagggtcccatgaccttcatgatccctcctcctatgagagaatggtcacggcaacaagaacagctttgatgatatttgaaagaaggctcagctgaactcatgagtatggtgtgcattctacttggaggatagggctgcataacactttgatgcaggtttgaaatcaatggggcgatgttctggcatgtcctatcatagcaaagcccaagggtcttggctgttcctgaaggacaccgtgggaggactgctgctatttattaggttggttcaatatttcagggctccagcatctttctggagactcaaggcagcctaccaaacagctggattcaaactctaacagccatctttgaagtcagataccacagcccttagcagtgggtggtcctgattgatggtgaggagggtaccacatacattcattgacatctaagttgggctggctgtagatgctcccaggatgacccactttgctccctgggcttctcattcactttcttccatggggatgtgataagtggtccaagaacataaagtcacagaagtgccccaactttgagctacctatgggagagggttctgaaagcagacaccatccactaacactcagcacatggaagcgtagtcacagcaggacctaggtagctcctgttgtgtgctggtctccttgagggcctactgtgtatgtgggctgtcagacaaaaaaaaaaatttacaggcgctagaccccatggagagctgtgctgaaggattctttggcagagatttaggagactcaggagcctttgagcacatggcatgacatactgccctttattctgctcagcaggagttagtgacatctaggagagaggctgatggtctccaggctactgggtgtgggtgtctggattctcctgtaagaactatagggcagtacctggaatctcccccccccccttcctgtgttaatatgaatagccttgattcttagccggactcttaatgccctaatgtccttatccacaaaggtgaggtgagtatgtctccttaaaactttgtgactaagatttgcagtaggtccactctggtcctgctaaatggccaacattcacttggattgactgccgtccgcaggaagtcacttgtgaatgctgtatgaactgttttttcactctgtgtaacagaagacttaagcaaatgaactcaaggggggaaaggtgatttggctcaccttttgagttgagaggtttcagtccatggttggctaggctgaaacctttgagcattgagggagacacagtttcaaggatagtgcagtgatcattccatgggagtgagagagagtaagggaggaggaggaggaggnnnnnnnnnnnnnnnnnnnnaggaagctgcagcctttttttttccccagtcagttcccatctttcagctcctaccacctctcaatagttcatcaaacctgaatctatcattgatcaggtcagagttctcatgatccagccacttttcaaagtctcatctgttgagcattgtactgggagccaagctttgaacccagagcctttggtggatattttatattggaccatatgtgcgaattctgccctactgccctccctcccctgctctacttgctccctttgcctttaagacgagttcctgtttcctgtaatttcctccttctccagacgtcccttccttcccgtttatctccctgcacaacaggaagaagaggcctcctccccctattctctcccttcccccagagcgcatctttccctgagcaatccaggggccttgaacatgtcttctgtattgactgccacactccggtccttgggatgatctgaattcctgggatggtgagttttatgtgtgtgcaaggctgagctacaatacccaattactcaaccagatggtaatctgggtgttgtcatgagggcactttgcagattggtcagtagctccaatcagatgaccatatgtgaaagagattatctttcaaaaactgggtgaggctcatccaatcaaaaaggccacgagagggaaatctccctccatttcgcacggtcagtttctgcccaagaacatccattcttccagcctgcccagcagctgtgatatgtgaggcacagctcatatgaactaaatcttccctggctttgtttcttctggaagcctggctcattttccatctgccaccctcctaaatgtctctgaggtgcctgctaccttgaccttctggggtgctctctgacccacgatgtaggggctcctttctgggtgttattcctgcttctcaaaaactgcagggtatcttttcctttaacaaaccttcacagaaccaccatgctggcatttgttgctttgaatctcttggacttgtcttactattctttaagtgtcttctgcccttctcctttccagaatgcctgcaccatcacataccacaggtcttgcactttatctgcttttgctcttgtggttctcttttggcaatggatgcagaatcccagtgtgaactgtctcagccagtgggcaaagaatgtctaggttctatgcctatcgagtctggaactctatactgtggccaaagtcctgattggcttagtctaaatcatatgacctctcttggctcagtgagctgtctgctgtgcatggggaactggctgctgcagatggcagttcccaccagaactgacaaactgaaaagaataagatgcagagacattcctttaaccaggatgttcccagaagaggagagatgtgcaggagaccatccaactatacctgcattcactgcctgtttcttcttgccctgttcacatttctctagatggtgagactcctttgcagtgttgagtgagaactcacagatggtttcctttggtccctctgccacagttcagctgggcagcactctcccctcctcacctctgtggtcttgagtgtctgttcttgtgatatagactcagtatatgcagcatttcttcccccttagctgcccacacatgccttttcacactcccacttgcatagacatattttcataagtattatagtttgtctcagttcctagagcagcatacttggtgctgggtgacttatgagaagagaggtttatttctcttattctggttgattgaaagtaaaagagaagcgcacgtgaaggactccttctgtgacatcaaatatggtgcatgatttcacatgaggggagttcatgtacacacatgtgcacatgcacaagatgtgtaccccatgtttgggtgtatcagaaagccttctcaattgctctacatcttatttttttgggacaagatttcagattgaacatggagctcactgtgtagcctggggtgtcaaaaacatgcgactgtacctggatttcacacggctgttggcgatctgaaatcacaggtcctcatgtgtgtacagcaagcagtttatacacggactcatctcttcagactctcattattctttttctacttttatcacacacacacacacacacacacacacacacacactgtttacaactagagtctgcatatggagaaatcacacattgtgttttggagcctgacttagttcacttaacataacaatttccagttgtattcattttactgcagatgttgcaatttcatttttctttatggctgagtagaattccattgtgtatatgttccacactttctttattccctcctgtactgatgggcatccaggctggttccatttcctggatattgagattagtgtgacagttagcatggggtgaggggcaaggctctctgtggtgcattgacttaaagtacttgaggtacacaccccagggtggcacagctggatggtagtggacttttatttttagctttttgagaaacttccacattgatttccataatagctgtgcctgtttatacttccatcagcagtaagtctttctctctccttccatcattgtcaatatcaattgtttctccttttctcaatgttagccattttcaacttcttcactttgtgtgtgtgtgtatgtatgtggtgctgcccatgtgtttacatatgtatatgtatatgccatatgtatatgtatgaaggcatacatgcatgcttttttgtgcatgtgtggtgtgactgtgtgcatgtgttgtatatatgtggtgtgttcatgtgtatatgtgtggcacacatgtatgtatgtgtatgtatgtggtttgtggatatgtagtgtgtgtatgtgtatatgtgcacatgtgcatgtgtttgtatgtaggtgggatgtgtgagtgcgtggtgtatatatgtggtgtgggtgagtgtgagcacatgtgtgtgtgcctgtagaggcccaaggttaatgttgacattcattcacagttgtactttcaccttattcactgagacagggtctctcagtcataccaaaagctcggcaatatggctagttttactagccaacttattctggggaaatcccttgtttttacttccttaggttaacttacaggtggctaccacacctacctggcatttacatggtttctggagattgacgttagaattgataatatggtacatcaaagaaggcagtgagacaactgttgggggtagttgtagagcaggtgcttcgcctgtgaaatatttaaagagatactgagtttggagtatgagagagaatgaagacctgtgtggctggaggggagggaggagtgagaggaagcagctgtgctgaagagcaaggcaggggaagtcacaccaggtctcagaggttcaggtcacagtctctgggctttctaaggtgggcaggcacctggtctgcttcttgcttggagaagtctctgctatgtggacacactgcatggatctggcctgggaaccgagaggccaggctgacctgtcagaatgatttcatgaagagatgattgtatgggcaggccaatagtagtgatggcagaagagagggtttctggttatcttttggattacaggtgaggaaagaagaaaggaagattgccaaagagacatcttttcagttggatggtttgtgatgctgcttctatggatagtctgttcaatagcttgtatcttaagatattcgattatagcacaaacatccatgccataaaaggcctagttcctagtctatggcaccactgggagtggcacccactttaagaggtggggcttagtgggtggtattatggctattaggaatgtatttgttattctcaagaagcaagtttagttaaaagaattgttagatttgtcatcaaaggtatggcacaggatgagaggtggccaattacattgtatcttttgtcaggaagcagagtaagaggaagggtgccagctgtcttctatctagttctatccatgaatccctggcatggtactgttcatctttaggacagaaatttcctcctccattagcccagtcttgaagctccctaataggcgtgctgcccaggcattttttttttcttatgtgatcctaaatcctctcaagttgaccaacaaaagtcacagtgataggaagtttgtccttaaggggagacgccagtctctatgttctcttgttttttgaccatgaggtgagtgcctttgtggtgccaagtacttttttttttattagatattttctttatttacatttcaagtgttatccccttccctggtttcccctttgaaaacccccccatcccatcccccttccccctgctcaccaatccacccattccctcttcctggtcctggcattcccttacactggggcatagaaccttcacaggaccaaggacttctcctcccattgatgaccaactggccatcctctgctacatatgcagctggagccatgagtcccactatgtgtactctgtggttggtggtttagtccctgggaactctgggggaactgattagttcatattgttcttcctcctatggggctgcaaaccacttcagctccttgggtcctttctctagctcatttatttgggaccctgtgctcggctcagtggatggctgtgagcctccacttctgtatttgtcaggaactggcagagcctctcaggatacagctatatcaggctcctgtcaacgagctcttgttggcatccacagtagtgcctggttttggtggttgtttatggggtggatcgctaggtggggcagtctctggatggtccttccttcagtctctgcttcacactttgtctctgtaactccttccatgggtattttgttcccctgtctaagaagggtcgaagtaactacactttggtcttccttcttcttgagtttcatgtgttttatgaattgtatcttgggtattccgagcttctgggctaatatccacttatcaataagtgcatatcatgtgtgttcttttgtgattgggttacctcacaagtactcttttgatgatgccttggcagagtccccaacacttgtggcctcccactcatgggctggaacctcaacaacactgaggcaatgggaatctattcttttaataagcagattaccttaagtatttattattagcaacagaaaactgattaacacaacctatccatatctgtcacaaacacctggcataaacaactttaaggtgaaggtttattatagcagatgctttgaggttccagtccatggtggcccagctccagatgaatccatgttccagagaaatgggagtgaatggagaaggcagcttacctcctaggaggtaggaagtagggagggtatgcccgtgcatctgtggactctctccttttcttcctcttatatgccaacctctaatctggggtttggtgatgcttacgttcagggcaggtcttagttaatccacctggacatttttctatagacacacccagaggtgtactttacaaatctcttagcaacttcctaatgcaaccaaggtgaaaaatgaagaatcctaaaataaaagaatgagcttatgggagatttagaatcaagatttctggctggattgggttcaatgtgtatgtttccaagttggtagatacatccagaagtcctggcagagccaaggatagcgattcaagttgggtgtggaaggggtttaaaactagaggactggaggctgttgctagagtaggaaagaagctagtggtgataaatgaccctagacatactgggcatccactcctgagccctctataactatagataactataggtgtcttggtcttatcaatggaatccaatcctgctgcactgccgagggaagtggttttttggtttttgtttgtttgttttttagctcatgttgctaggctgtcttctgggtagcatttctttcttttttttctgacatcccccgccccccccccccccacaccttccagggatagacttccaggagtctgaggtcagaacagccaatgaatcatgtgatgtgtgtgtcttctgaccaccagcaggtggattatatctttacagacatctgtcatggatcctaaacagcctcatcacagccccttaccttcccccctctgtcttctccatctcctacttgcactgacgagttctgaggactgttcatgtttacttgtcccctggcctagtgctgatgtgtggagtaggagggaagggcaaggatgtagagatgggctggggtttgggccacatctcatcagagttgccttgggtatctgtgaccaacagcacacagttggatctctcttttctccctgtgacagggattatgatgaactgctcatatttcattcttaatggagttttattgctactccagaatagagagattgattctatatactttctggggtgctcgtttccctctaacctggaaatcactataatcaccacgaaaattctgtctcagcatctgaatctgcatctccagtttcttctgaggagtgggtggaaaagggagctgtgtgttaggaaagagcccatttgatgccctgatcagaggttgcacggctgcttcctaggagagctgcaggatggctgccacctgtctgggctgagccagacactatgggtgctgagttattggttgcaggcgggggcagcactgtcctggggccatcatgagcagtccccagtgttctataaatggtgcagctgataatgctgacttgggagtcggggaccttgctgagtggggatttatttatttttttattacttgttttcctgggaggtgatggaggttgacaatactcagggcttacacacaacacacttgtccctatcaatcagagaggcgaagagcagatggtttggaatctgtggacttgaactctgatgctgacacttacctcatccagtctcggattctatttgtgtaatagggacaatgacagaactcgagtcaagtgggtcagggagcacccaaggcttgacaccatgtccaacattgccagagttttcccgtgctcatcacttctggttgtaatggataaagaggcatgtgctatggttctggtgtgaacttgtgcaccaacccagtgggttcttatcagacccaagcttctgtccttgcatggaggattgatttcattagttaatttaaatctttttctatataaccttatagagctgctactgtgtgcctagctcagtggttggagctgagaatatgtggccttgaataagttcctggatcactatttatagatgcctgctgctgccacgatgtccattggatactgaggttgtcccagaagtcaggggaccttctagagtctgaggtatagattacagttcctggtgcttaactgctttgcttctggaggctgcagagcctagtgcacatcagaccccttgagtcttaatgtagcctctgggctccagttcttagctgtagagtagaaataaatactttacacttgagaggaggataggaagagaaaatgaatgagtattgggagacagtaaagagaaactgctatataaatgagggttccttgttcatttcccaagacctgagctgctggcaggaagaagatatccctctgggaggagaatgggtggcgctcattcctgcatccacatacccatctcatgggcccctcccactgacattgatcatactatcagtgcagttgtatgcatcctcctttgtgcctgagagcagctctggcatttccaggcctttctgggggccagtgatggatggcctcctgtttcagcatggcctcacttgtggcagacctgggtgggggcaaacaagtgatggatcagcttgaagatggtattttggaaggaaagttcaaattatatttcaggataatatcctgccacccggcctctactccatatcccatttgtaatctaacccaagaggttctggcgggaggtaactagcttgtgatgaatgggctggcagtcccattagccctgcatatcctggatcttaattaatatagataggcatttaatttgggatttaggaatgtttttaaagcagggctacatggaaccacaggggaccctcagctccctgtctttgcttcgagagtggcttgcatacctgagctgggacatccagtcatatctccccatctttatagagctcccagcctcagctgaccacaagtctgatcatgaccaatttctgtcatccatcatcttgccttccaaggcacagtgaggcatgaaggttctgattgcaaggcagcgcctaggaccagtggagggctgaggaaggcagaaaagtcaggtgcccaacttcattcaggcttagagtcgtgtatgcatatatgtatttatatgcatgtgtgagtacacacacgagagagagagagagacagagagagagagagagagagaaagagagagagagagagacagagagagagagagacagacagacagagagagagagagagagagagagcgctatctccgtgtactacatactctgcattcacctgtcagttgaaaatattcaagaaacttatagctataaaaaacaggtgcagactttttggtcaatattccctaaacagtactatgcagcaatgatttacatagcatttacagtgtattaggtattataagcaatctgcagatgattgaaagcatgtcacagggcatacacagactaaacaaaagtacagctctattttgtagaagagatgtgagagtctcaggatttgttaattcaggggattctagaaccatttctctagacagcatgagatagccatgtggaaggctgagaacatggaaggcttgggtaggatatgggtatgtgccttgggagccatggcataccagtaaatgtttggaaagaagtctccaagaaaacatgaagcatcagtgagtagtgtcagttgatctctgtgattaggtcctcatgccacggctgcttttgagcctgttgatgtcactgcacatgaggatggggggggaggaagtactgtttcctctgtcaaatctgatagacactcctagcctcagagcacagagtaaaaatcaacaaaaggtctgggaggtgttgagctttgtatatttgtcagtgttgtttctgaaataatgtatttaattataggtttgtaaaatttaattaaagtggttatatttggaagtgccccaaattcttgaaaagttaatggtagggtctggtgagttggtacagctggcttcagtacagtgtatgtgtgtaccagtgagtgtgagcactgcatgtatgtgtgtgtgtgtggctgtgtgtggctgtttgtggttgtgtgaatgaatgtgaatgtgcacataagagtgtgaacacacggtggaatatatggatgtgcctgaagggctgcacagtgtgaggactccttcacaacaggactaagctgctctctctcttgtttgagtctcttactcttctacttgtttcctgtccataggccacatgagccataagctggcatctggatttcctttctccttctgcacttagctgatctggggcaaagctgcccgctgtctatctgagggctctaatctaccagagaggagagtctactgagtcctacctgagccatggccctagattgccatgacctctagacttctgcccttccacagaacaaccctctgggatggtctctcctctcacctgccaacattctgtcctcctctgctttaacaagagtgtcccagtgatgccattattatatcctttgtcctagaggtgtgcccaccccatctgtctgatcctggtacagcctgatgtctctttcctgatgaggccagcaggtgattttgtccactgtgcctgacactacctacatcttgcttctggcagagagatctgtccttgagttgggtatttacctgcctcttcaatgcaatcttcaaagactgtggtacaacttttgtgtccagtgagttctgaggctctctggtactcttcagtgtgggcagaattggtccgtcttcagtcatggtacttgaaaagccccaggaaaggggactggaatctgtcagcctctccttagccttccttcctcattctggttgctgctacctcctccaaggtgggctccagaggaaacatattaaactcaggttggtataggagtagttatataaatctcatctggaagttaatggtacttaacttatcacaaggtcaggaggatgctgtgtggacagagccaccagggagccaaagtcctcataaaagcttcctgcacatctccggtcatggaggtcacataggcacagagtggacttcaggtgacgccactggcattgccataccagtacatcctctccctcagagacttgacccaccctgggcaggagggctggctttgtgtgcctagtctgtgttgcctagcgggccacctgatgtactttatatccagaaatgtcactgtgctttgtctctaggcattaccttgtgctcatgcagaatgattcgtaggtcacccagctagaccgttgactttgtaaagctgggatcccaggggtcctgaggtcctcttggtctagagtttaatcccctcttgtttgtgtgtagaattcatgctcaacctataagacccactcttgcagtttctcgaacgctgttttgagacttttgttgatggtaagcagaccccttcatgagtacttcctggcatcccaatgctactgactttcctgtcttcagttcggttctctgaagcttatctcaggttcttgtcactttctctgacatctgctacagaacatgacctaattgggcagtagatagagtgttggagaaagcctgagtgagggattgaagtcagagtattgctgctggggcaacagagatctcttgagtaatgactggggcaccctgccatttttgggttgtcgatggtcctgggaatcagaagggcctggtgtgtagtcggacaacagcgcctttcaggtcggaagaggtggcacccaacctgggttgcttctaattcatctcagctgggtgtgctgtttttagtatcttggatttttcctcagtggtaatttacaggactaatgaggatgccatgtttcgctgtgtaatggcagttattaatactgatcgcacattagcagctggtaatggagtggtcacatctgcatcttcttgccattccggaaagctagactccagcatcaggtctctggggagttctgttgagctttggctgagccctctggagaactgagcttggggttgccaggcccaggtgcgccttacaaggagcaaggtctctcctgggagacagctgaagttgcaccccgtttctgtttgagccggtgactaagctgcaaagtggacatcatctagtcattccttaggggtgttcaggcccaggtgaagtctgggctacacgtggttcccagataagcacagagtttgtgcaccttcctccttcctgtcacctctcaggtgtctctggcttgctggagaattctgggtttgaacttctattcagtctcttccttgctggataacctcagaagacatgaggctgtcacggggatggatggatgaggtagtctatgcaaattactcagtgtagcggcacaaagtcagaccttaaaaagcccctgctgtgtactaatcatctcggcttggtatgaagaaaagagtattctatggtttaaatggattttttttttcctcacagctctggggtttaggagttcaagagcaaggtgacagacagatccagagtctgttgagggttcagttctctttctggtttgcagaagtctgttttcacattgtgtcgacacacagggtggggaaaaagctggatcattggtccggcctcttgtttcctatcagggcactaacacatcaccatcccgccccccctccccggcttccccactaatcttcctccttcttcagccaccaggactaggagttcaacatgggggttggagggacatagacattcagactgtgacatgccagtaatattatgccattgctccttctgcaatggcacagacacactattaacaaagagcaaagatgtttagtttagggtccctggaaatgcatggggaaagttacttttttttttttgtgtgtgtgtgtgtgtgtgtgtgatcttatttaagttacctagagatctggaaaaacatcctcaaagcacagaggtggctcattccgttcttgtctggtggtattggagagtctcaacctttctgtccttccatgtcctcatctgggaaattaggtgtgatcgggcatcatccagaggctgtggggagggagacaaatggtggctgaacagcctgaagctccaggggactatgttttgcctcttggcctccacacccaagggtcctagaggcaggaagtagccatcaaaactgaaggctatccattggaggtatcagctgggagtcttgcctcagccccaggggactgctgatacctctaaatgctgtgccatccattatccaacaaagccaggcagtgtcctaagcaaaagcacagtccctccagatcttacaggaagcgctgctaaaaatcaatcccaaataccttgtaagtgaaaggtgacagggacatcaaactttatttgtgaaaattctaaaaatcattagcatattatggattctataaaaaatatgatctcactcagttgacgagagggaattgcaaatcaaaggcactatttattgcactgggaataaggggccttgcagattaaaaaaaaaaaaagaaaaagaaaaaccaaaacctgattgaaggagccagaaatctgaaacatgaaagacagtagcagataaatatcatggaattttctgcaaatgcttcccatctctgaacagaagttggtgaagaattattttataaacccattttcattataacatgtgtaaaatgcaaatcttgatcattatgtaaattagttacttggtgtaatttacttaattcaaagcacttaatgcagcgtggtatgttttttccaaagtgccagagtagacgtttattttaaattgtttttaatcttgatcttccatcctgattatttaaaatgtttttcccttgtgtttgttttttaaatggaagggaatagagcttggtgggaagtggagtgtgctctgatcagccaatagcctctgctggcagggccctgggcagggccagaggagaccccgtgtttgaacacagatccactgccagaatacacccccagggaaaacatttaggccttctttcttcccagaatctaccctcccctggctttgtggctgcttctgaaacctgcccaagcagagcctcctggatgttattggtcctcattagaggtagaattgtgtccccctttctcagagttttcaatgacagctctttcctttcagctactttgcaactctgaaattcccattatcacagagggtagagccgacctttttagtttcctattgtgtcacccgattgtcaggacggcacctcctttcctgacgagcctctagaacaagggagatgatttgctcatttgagaacctttctgggggcgtttcctatgctgatgagaaggttggaagggagccgacagcggggacatctgttttgtgctgtggcagctctaatgtgtgcctctcacggaagcatgcccagctctcctgagcaaggtggggcacttgtttgcagagtaaaaatggctcagagaggtgttgcaggaggtcaatgagcttgtggggcaatggattggaatgactattccgtgcacctctggttaggggatgggtgaggtgtgggtatggatgggttgatcaaacttggcttctctgtgtccttctagagctctgtatcccaggcaaccaggagagagggcattttgttttgttttgggggggggtaggtcaaagctgtccatgtttaggggtatgacatgatgtatgggtacgttaggcaaggtctaaatcacgctatgcaaggctgtcactagctcacactcttatctgtttggcaattttcaaatataaaacatgctagtatgaattgtagtcaccatttgttcaaagtgtctcctgaatttattgtttttatttatttatttatttttaaattggaggtttggccctttcatccattccctcagtttacacaaatgccagcagccatcacaagacaaatttctaagagttcatctttttatactccttatatgaaagagactacatggtactcatctttctgtgtttagctatttcactcaatatcatgtgttctggattttcctgcttgttgcaaatgacatgattttattctcttttttcctgtgccgaatagcgttccattgtgagtaaatgttacacgtctttatccatggatttgccgatagacatgcgggttgatcctatatcttgactactgtaagtagtgttgcaatggcaagcatgacagtgctaatacagacattattactatctagctatggcagtggcagaaggccataagaagatagccactgaaatgacagcttgttgtatcaagggaggagaggtgacactgggaagaaatgagacacggttgtacatgagctagggccttccctatggtaagcaggcgaggagggggaatcaggctgagagctggctggcatgggtgattgcagtaggctttggatagtaggctgtccctggccctaggctgattagggcaggtagattatatcctggagtatgagaatacaaagagaagggggttggatggtgggtcctggatgggttgatttacttagaatgggatatgtggagccattgggactatctccaggaattgaccaaccctaagtgacagcaggaaccctgataccaatgaacagaacacagaaaatccaagacatgggtagcacaaaggaatagcttttggtgagtgacattcattccagaggtacccttgactgtggtctggaccttccttgactgtagtcaattctgactaggatgttgaggcccagaacaataggcaccgtgctgttgaggatagtgtgtctcgagcatcctcctcacctgaagacagtccctgcctgggttcttgatttttttttgccaggtcatgacaaagaataacctgcttcctgttttattattgcgatggactcatctgtgtgtctctggcccccttgctactgaatcagccttcttggtgacttctgtagtctgcatggattgaaggtatgggttaatttattcagaatatacagctagcaaggggaaagatctcacatttaaggcacgctcctagaatggcagagggatcactccctccctgctttcaggtcagcccctgtgaagaagggggttccttgagggcagatctgtgaagcccttgaactcagatgccctgtcacccatcccggggtctgactcagagcagtgttcggacaggaaggaagaaaagttggaagaaggagagagtcaatagaaagaaaagatgcagagctggcaagctgtggaaggagcagatgagacacagaaggattctgagctagacagggctgttccttatgatgggtatcacagcaagtctctgtggtttctgttcttagcacacattgatgtgtatggtgtgtgcttcctcacctgtggacccaggctcatcataccctgctttgatagctgctctatgcccctgacagtgatgaaggctttggagctggtagtggggaagggagaaggtgataaaggacttatggcacctggacagaggtcttaataaggaacctgaatgatggataaactatatctgggaagaaattcaaagtctgcttttgggatcccagataggaaaagaagcgcaaaaaaatatggagactcaaagttctgtctcagcctttagaacatttgccagtaatctccgagctcttctagctgggaactcctcctgggtgcgaggtggcagccttcatgcatatccctgtgcattacagatggtaaaatattctttgtacgtactctctgtgcctgggtctttctcagaaattgaaatagtaggggaagcaatttgaaatgtgttctttcgtttcaattccttttgagaaagacagtatttaaaataccaggtgactgtctgatctttaagaaggagggagaccatcacagatgcaacttcagattttttggaaaaaaaattcccatgatttcacttccttgcttaatacagctttgccttcagtggtatgtgtttgctgaagtcacactgggcttcaagctgggactttggctgatttcacaattttataggcttctatggtctttgtggtagatgctgagcctggggtaaatagagagtcaaggaaagtccagtttcttcttcctgtgtacccacctgttttaatatcgtttcgtgtaactcattttgaaggaggcataaattccaacttggagaactgagagggttttagagggaagagtggtctgagctgggtcctgatggagatgtggggttgagagttttgaagaaacatgatgtgggtgtagggttgtatgcattctcatgtgtgtgtatgtgagcgtgtgtgtgtgtgtgtgtgtgatctccagagaagggcaaagggtgtctttttctgatctctaggttcctggttaggtaatgaggatagctggtggagtcacaaaaatggaaaaaaaaaaggagaagtgatttgctccagactgcttcttagactgcttcttagtccaagttaagatgcatgagcttattttgtgtacatcgataaaatcttaagaaggctttttgtttgcttgtaatttgattgattgatacctttgaggttattaatttcttggcaacttttaaataaacttgagtttttgtgttattcattgaaggttagaggcaggctacattatacacagatatgaccttaaagagaacattgtagcacaatgcattagtgtgcagatactggagactttataggaagctgttgcagaagcccctgagaagagctggtggtaaactggagaagacatagtgaagatgaagccaaggtgtttagcagaagcagaggccacagccagtggaaaatgtaggtctctgcttaaagaggaaatgtggagtgagctaccgcaggggagcccagaattagctgtgaacaatgaatgtgtgagagagggcattcagaagtgagtggggcaaagaaagggccatagtgtctggagtcctatcaacgagagagcttcgggacaagcctcttgtggagacttgtgttatgaagatgaagaggaagaaagtcaccattttgatgactttggttggagttttagaacatagtgacacagacaaaggcagactttgattagagtggcccctaagcagcagcaccaggctatgcttagggagaagggacaggcatgagacctgcttctacccctctgcctctgatggttcctggtctctgctgacacttcttttctatctctggtaactctggccaatgctctccttcatctgttgtcaaagatgcctcattttggaactttccagacattgtttcttctgtctggtttctctaaggggtttctggagctacctcctcctcaccaatgttttctcacaggggacattcctcatcctacccctgtaatttgcttctgcccatcatggattttcttgagagcttgtcagtaccaaaaatgttctattccattgtttatttgttctaggcctgttttcagtcttaccaccaccccagtgtcagtcatgacagcagggccacccactgtgggctcacttcagttttagttcctagatcccaaggggggaagtcccacacagagaaagctctcagtggccatctgaggaaggaacacattggtgatcactgcagaaggattcactaagtcagactggggattggaaagagcctaagagagggcaggaaatttggaggagacatcactgaaggcccgtcttggcttgccatgccacattgtccatgcttccagtctgtttcctctgaggatgggactccttcactgtctgtgtggagtgctgaaaccactgtttattctggttctcgctccttcagaaaaccaggtaggcatgatctgaccctagacagttccatttctggggtcatcagtcagtctagttgggggaaggctttattcagaatgggcctgagttaaggcccagactacatggcagcactctccatccccttccctcatctgtctccctcttaggggagttctaccttcctgagaagcagcagaatggacagcaggctttaatgcagagcagagtagcatggcattgtagactcttgcaaggagaaaatgaccttggttggacaagaggcttccctggtcctctttttggggaacaagtagaaggtgatgaagtcagcttgtgctctgactggttctttgctccagccctccccgagtgcagctgaaaaagaggctgagactgaccttttcagccaagtgggagctgcgggtgtagcgagggatgctgtctcttgggagcactgccttcagcagcatcactaataccaggagtgaagagcttgctgttgctaacgggaacttaaactcttcctgatggctctgtctcattgcctgaaaagaagccagaaatgcattattgagggcatgaaagagttctgggacgtttttccctccacatgtgcatcttcttgccggtatctgggtgtcctgacatgtcctgcccagtcatgtatcctctcctctctaaggacatgaaaccgtgctgtgaagtgagagggttttaggaaggggcatcagaaaagggactgtaggggacttctattccaggatgacattgcaggttgtgctgccatgactcatgagatcattcatggtcctaccagtccaatgaaaccatgtgagctttaatggtatgcaccctgtataaacacgtgggaatattctgtggatgtggtcattctctgccaccttaccaattcactgctctcttaaaaggtgctgagaggagcaggacatctcatatcatatcatagtagcagggcctcaggtcttcaatgctttccctgtctgttgtgatcatatctaggccataggttaggccgtggggcactgataatggccttgcttgggtctggcttccactcctgtgaacagtgccacagaagatctttttaaaggtacagaccttactctttttctacatcttcatgagaaagatcagatataatccagcccatgacctttcaagtagtcactgatggtaatcaagctgttcccaaattcagaggcttagaacaagagtcatttgttatttttgttgagttgatagttcaacctggttgctctgccctggccacactcaactctgggctctgctggcatgtgaccacagtgattgcttggggaccagcctgatttttctttgtgtgtctcagcatctcatcagcaggctcccccgagggtgtttatatactagtagccaagtgcaacagcagaattgaagtatacaattgctcataacactgtttatgctaagtttacttctgtcctataggtcaaagttatcagtgtagccaaggccaggaacaaagacagagggatgttcaaagagatgagaaaaaggcatgggactggaaagactgttcctaggggcctaaagacagccatctactttacctggagacatcgtgcatactacactggctgctggctgctgagatagtctctaggctataatgggcagtgctatattcaggaaagggttgacacctgtattgagtgtttctaaaaattgattgcctcttcagacacctgtatttctgcacctttgtacagtctccaccaaatgcccctcctctctctgttagtgataagaagcagaagcatgcttgctgtacctgacttattttcacttgacacaagttcatctaggtttatttatgcttccacaagtgactggatttcattactttctatggctgaatagtatttcaatatatgtataccttacattttctccatccatccatccatccatccatccatccatccatctgtggatacttaggtttatttcacagtttgggtattgtgaatagtgctgtaaaaataaatgcttaaatagactattaccaagtatattacttgatttgcacaagctgatagtaaggccttattgttagggataacacctatacaactcactggacatgcagaagtttggctggtgcctaactagggtcttcactactgctgggtagttcatggtactggaaggtactctacatgctaccaacggagaaatgtaggtacaaacccagctaccaacccttcagtttagaatggtgacctgctcgcaatgtgtgctagtaaaatagtggcacaaagctgtgggatagcaaaccaacatgtaattggatgtaaggcccactctatgagatcctcaacactgcttaggtggccaagaacagcaaaaggagcataggtagcaatggatgaccccaatggtattctgctagactcgtaggtcagtgtactgttcagccatcatcagagatgctccctcctacatagatgagaataaatatcgagactcacagatagacaaggtgccagatagggtcccagcccttagaggagaagtggacacaagcccccatccctaacccaggaactatctccattcgatgtccacttgcaagcggaaaattatttttcttcaatggagtctcattgggtaaacaaaaccacactttttaaaaattaattaattagttaattaattaattttctctgtttctcttcagaaaaggaggcctcccatggatatcacccagcactgccatgtcaagttgtagcaagcctcggtgcatctatcttctcctattgaggctagaagaggcagctcagtagaaggaaaggtttcaaaagacaggccacaaagtcagggacagctcctgttcctgctgtcttcccgtatgaagtctaagctacacaactgtaatatatgtgcagagagcctaggtcagtcctatacatgctctctagttggcagtttagttagtctgggttaacgcctatgggtgcaggatagttagctctgtgtgttttattgtggtgttcttgacaccgttagctcctacaatccttcctctccctctcccttagaattcctcatgcctcatctaatgtttggctgttggtctctgcatctgtttccatcagttgcttctctgtgacaggtctctgataacagttatgctaggctcccgtctacaagtacagaagaatattgtttgcagtatcaggggtaggctccttttcatggcatgggtctcaagctggaccagttatttgcttagtgactccctcaaattctgctccatctttacccctacacatcttgtagtagaacaaattgtgggtagaaggttttgtggctgggttggtgtccagatcttctgttggaagtcttgcctgattacaggagatggccagttcaggttccatatcccccattgctagcagtcttagttagagtcgcccttatgtattcctgggagtttccattgccctggtttctagctcattccagagatgttttccctccctgtttccagttgcttctcccactactctattcccctatctctgtccactcactgtgtctattctatttccccttctcagtgagattcatgcattcccttgttgagccctccttgttgcttagcttctctgagtctgcagactatagcatgattatcttttaccttacagctaatatccgcttatagatgagtacacaccatgtttgtctttctgggtccaggtcacctcactcaagataatcttttttggttctatcattttgcctgcaaatttcatgatgccattgtttttaatagtggtgtaatactccattgtgaaaatgtaccacactctatccattcttcaatggaggaacatctaggttgtctctagtttctggctattataattaaagatgttatgagcatagttaagcaagtgtccttgtggtacagtggagtatcttttgggtatatggccaggactggtacagctgggtcttgaggtagatctattcccaattttctgagaaattgccaagttgatttccagaatggctgaacaagtttgcattcctaccagcaatgaacttcccttgctccacatcctcaccagcatgagctgtctcttgagttacaaaatgactcttaaggccggccctatgcccagcagtagatagccaatgcaaaatgaattcaatggtagggttttttcatctcataatgctttgtctgggtatttcttttattttttgctttgtgtgtgcatgtatgtatgtgtatatatatatatatatatatatatatatatatatatatatatatatgaatctatatatgtttcttatgcttttttggctctttattttttgtttgttttgtcctatataggttacaggtctatttagttttttttccattttttattaggtatttagctcatttacatttccaatgctataccaaaagtcccccatacccccccccactcccctacccacccactcccactttttggccctggcgttcccctgtactggggcatataaagtttgcgagtccaatgggcctctctttgcagtgatggccgactaggccatcttttgatacatatgcagctagagacaagagctccggggtactgttagttcatattgttgctccacctatagggttgcagttccctttagttccttgggtgctttctctagtttctccattgggggccctgtggtccattcaatagctgactgtgagcatccacttctgtgtttgctaggccctggcatagtctcacaagagacagctatatctgggtcctttcagcaaaatcttgcaatggtgtcagcgtttggaagctgatcatgggatggatctctggatatggcaatcactagatggtccatccttttgtcacacttccaaattttgtctctgtaactccttccatgggtgttttgtttcctattctaagaaggggcaaagtgcccatattttggtcttcgttctcttgagtttcatgcatttagcaaattgtatcttatatcttgggtatcctaagtttctgggctaatatccacttatcagtgagtacatattgtgagagttcttttgtgattgggttacctcactcaggataatgccctccaggtccatccatttgcctaggaatttcataaattcattctttttaatagctaagtagtactccattgagtaaatgtaccacattttctgtatccattcctctgttgagggacatctgggttctttccatcttctggctattataaattgggctgctatgaacatagtggagcatgtgtccttattaccagttggaacgtcttctgggtatatgtccaggagaggtattgctggatctagcggtagtactatgtccagttttctgaggtactgccagactgatttccagagtggttgtaccagcttgcaatcccatcagcaatggaggagtgttcctctttctccacatcctctccagcatctgctgtcacctgaattttttatcctagccattctgactggtgtgaggtggaatctcagggttgttttgatttgcatttccctgatgattaaggatattgaacattttttcaggtgcttctcagccattcggtattcctcagttgagaaatctttgtttagctctgtaccccatttttaatggggttatttgattttctggagttcagtttcttgagttctttgtatatattggatattagtcccccatcagatttaggattggtaaaaattctttcccaatctgttggtggcctttttgtcttattgacagtgtcctttgccttacagaagctttgcaattttatgaggtcccatttgtcgattctcaatctttcagcacaaggcattgctgttctgtttaggaatttcccccctgtgcccaaatcttctaggctttcccccactttctcctctataaatttcagtgtctctggtattatgtggagttccttgatccacttagacttgatctttggacaaggagataagaatggatcaattcacattcttctacatgataaatgccagttgagccagcaccatttgttgaaaatgctgtcttttttccactggatggttttagctcctttgttaaagatcaagtgaccataggtgtgtgggttcatttctgggtcttcaattctattccattgatatacctgtctgtcgctgtaccagtaccatgcagtttttatcacaattgctctgtagtacagcttgaggtcaggcatggtgatttccccagaggttcttttattttttgagaatagtttttgctacctaggttttttgttattccagatgaatttgcaaattgccctttctatctcagtgaagaattgagttggaattttgacggggattgcattgaatctgtagattgctttcggcaggatagctatttttactatattaatcctgccaatctatgagcatgggagatctttccatcttctgagatcttcaatttctttcttcagagacttgaagttcttgtcatacagaccttttacttccttagagtcacatcaaggtattttatattatttgtgactattgtgaagggtgttgtttccctaatttctttctcatcctgtttatcctttgtgtagagaaaggccagtgctttgtttgagttaattttatatccagctactgcactgaagctgtttaccaggtttaggaattctctggtagaattcttagggtcacttatatatactaacatatcatctgcaaacagtgatgttttgacttcttcctttccaatttgtatccccttgatctcttttgttgtccaattgctctggctaggacttcaagtactatattgaataggtagggagaaagtgggcagccttgtctagtccccgattttagtgggattgcttccatcttctctccatttactttgattttggctcctggtttgctgtatattgcttttattatgtttaggtatgggccttgaattcctgatctttccatgacttttatcatgaaggggtgttagattttgttaaatactttctcagcatctaacaagattatcatgtgatttttgtctttgagtttatttatataatggattacgttgatggatttccatatagtaaaccatctctgcatccctgggatgaagcctacttggtcaagatggttgatagttttgatgtgttcttggattcactttgagaggattttattgagtttttttgcatcgatattcataagggaaattggtctgaagttctctaacttttttgagtctttgtggtttaggtatcaaactaaatgtggcttcatagaatgaactgagtagagtaccatctgtttctattttgtggaatagtttgaggagaattggaattaggtcttctttgaaggtctgatagaactctgcactaaacccatctatctggtcctgggctttttttggttggaagactatttatgattgcttctatttctttaggggagatgggactgttaagatcattaatccaatcctgatttaactttggtacctggtatctgtctaggaagttgtccatttcatccaggttttccagctttgttgagtatagctgatgatgtttttgatttcctcaggatctgttgttatgtctcctttttcatttctgattttgttaattaggatactgtccctgtgccctctagatagtctggctaagggtttatctatcttgttgattttctcaaagaaccagctcctggtttggttgattctttgaatagttctttttgttttcacttggttgatttcagccctaagtttgattatttcctgacgtctactcctcttgggtggttccttttgttctagagcttctagttgtgctgtcaagctgctagtgtatgctctctccagtttctttttggaggcactcagggctatgaattttcctcttaggactgctttcattgagtcccataagtttgggtatgttgtggcttcattttcattaaactctaaaaagtctgtattttctttttttatttcttccttgaccaaggtatcattgagtagagtgttgttcagtttccacttgaatgttggctttctattatttatgctgttattgaagatcagccttagtccgtggtgatctgatagaatgcataggataatttcaatatttttgtatctgttgaggcctgttttgtgaccaattatatggtcaattttggaggaggtaccatgaggtgctgagaagaaggtatattcttttgtttttggataaaatattctgtagatatctgttaaatccatttgtttcataacttctgttagtgtccatgtgtctctgtttagtttttgtttccaggatatgtctattggtgagagtggggtgttgaagtctgccactattattgtgtgagatgcaatgtgtgctttgagctttactaaagtttctttaatgaatgtggctgcccttccatttggagcatagatatttagaattgagagttcatctggtagattttacctttgacgagtatgaaatgctcctccttgtcttttttgataactttgggttggaagtcaattttattcgatattagcatggctactccagcttgtttctttggaccatttgcttggaaaattgttttccagccttttactctgaggtagtgtttgtctttatccccgaggagggtttcctgtaagcacaaaaatgttgggtctgtttgtgtagccagtttattagtctatgtctttttgtttggggaattgagtccattgaccttaagagaaatcaaagaaaagtaattggtgtttcctgtcatttttgttgttaaacttgggaatctgttcttgtgtctgtcttcttttagttttgttaaaggattactttcttgctttttctagggtgtaatttccatctttgtgttgatgttttccctttattttcttttgaagggctggattcatggaaagatattgtgtgaatttggttttgtcatggaatactttggtttctccatctatggtaattgagagttttgttgggtatagtagcctgggctggaatttgtgttctcttagtttttgtataacatctgtccagaatcttctggctttcatagtctccggtgaggagtctggagtaattctgatagacctgcttttatatgttacttgacctttttcccttactgcttttaatattctatctttatttagtgcatttgttgtttggattattatgtgtcaggaggaatttcttttctggtccagtctatttggagttctgtaggcttcttgtatgttcatgggcatctctttctttaggtttggaaagttttcttctattattttgttgaagatatttgctggccctttaagttgaaaatcttcattctcatctactcctattatccttaggtttggtcttctcattgtttcctggatttcctggatgttttgagttaggatctttttgcattttgcattttcttttattgttgtgtccatgttgcctatggaagtttctgtacctgatattctctcttccatctcttgtattctgttgttgatgctcacatctatggttccagatttctttcctagggtttctatctccagagttgtctccctttgggttttcttcattgtttctacttccatttttagatcttggatggttttgttcaattccattgcctgtttggttgtgttttcctgtaattctttaagggatttttgtgtttcttctacctgtcttacagtgtttgcctgtagttctttaaggacttctacctgtttagcagtgttctcctgtaattctttgagggatttttgtgtttcctctttatgggcttctacttgtttagcagtattttcctgtaattccttgaggaatttttgtgcttcctcttttagggtttctacctgtttagcagtgttctcctgtatttctttaagtgacttattaatgcccttcttaaaatcttctaccaccatcatgagatatgattttaaatccacatcttgcttctcaggtgtgttggggtatccaggactcgtgatgggcgtactgggttctgatgatgcccagtgttcttggtttctgttagtatgattcttatgtttgcctttcaccatctggaaatctctggtgttaatgttcaagctgtctctgtttggagcttgatcctcctgtgattctgttagcctctgtcagcactcctgggagtccaactctcacctgagttccagtggtcagagcactctctgcaggcaagctcttctcttgcagggcaggtgtccagaagtctggagctctgatccacctcctgagtcctggggtcagatcactccctgtaggccgactctcctctggcaaggaatgtgcccaggggcctgggtctcagctttgcctcctggctgaggatgaaggcccatgggaccctgaccaagaagctttattgcttctattatccatgttctctcaggtgattaggaggtcctgggggtgttaggggtcctgtggcatggagagtcctctggtgccctagactcccttggctgggttcacgcagaagatggtgggtgtggcctcaactggaaaagatcccagcctctggttgggcagggctcctttgtccctgttcctgctggcacaagaccctctgcaattctttggagctgatgttgtgttccactcacccgtgatcccgaggtgatccccgaggtcctgaggtgtggagagcactctgaagcccttagtggcctcctctgggctcagaaggaagatggtgggggtggccctcactggaacagatccgtgtttattattattattattattattattattattattgatgcctatttgttttctgatgagacacagagcaataaagaatttggacatgggtgggtagggaggaggggaggatctgagaagagttgaaagaagagacaaccataatcagaatatattnnnnnnnnnnnnnnnnnnnnaaccataatcagaatatattttatgtaaaaaatatctactttcagtaaaaaataaaatgaaataacatagggctgatctcatagaagcagagagtaggagtggtaactagatgccaggagggggatgggaagggaaaggaagctggttatcagacacaagatcctcttggaggggtgggggtgggagtgggggtgattaagttcttgtgttgtcataagaacttgtgttaaattctgcaaaatagttggacaagactattttgaatgctctgatcatagataaatgtgtatgaagtaatagacaaactaattaacctgacttgcttgttgtacaatgtatatatgtattaaaacatttcactgtattctacacatattcaattattgggttaattaaaacaaaaaataagagtaattcttgttttggtttgttttctgttgctgtgataaaacattctgatcaaaagtaccttggaaaggaaagggtttatgtggcttagtcttcaatgtcacagtccttcattgaaggaagacagggcaggaacgtagtcaggaatctggaggcaagaactgaatagagagagattacagaggaatgctgcttactggcttgctcctctttggcttgctcagccttcttccttacactgtccacagccagaggagggggaggattgctttgcctgaggatttaaggatttcttagaggtcccaggaggagctcagggactactcttggccatccccctgtggtagtcctgaaactgttcttgctacagtgaagttgagactagactttctgttaagtctatcttctcaccaagatagcaagctcatggactatataggaggttccttgataccctcttatatgtatgacagatgtgaaaaggagggaatctcagagcagaattagtaagcaaaacctgtttagttagcactgcttatttgggcatggggactgtggccttgtggatctggatactcagccttctgtcaagcctctgtccctgagcacaggataatagacgtaatagagacattctagactgggcataaatagctttcctgtgtgttgacaatttaggctacaaatgacagaaatgaaacactatatgggttagtcagcaaagggaactcttggtccatgagcaaaatggcacctggcccctcacaacagtaggtcagcgagtgtgccatctttctgggctttagcattcactctgaactctcacccttggacaattggtccaatagcttatcttgtagggactccatctgaaggctggaaaagtctcagtgaaggaccttggccatctattcgcctctgaagcacttgggacatgaacttctcactgggattgggatgagtcatttcttgggacaaagcagaaggaaagaaattccaggaagaaaaacaatcagatcctgaagcaagatagagcctcttctattggctagaggttgtcacatgagatgctgacattcagagggttagagaaggatccaggattagaatgacctatccaaatcttgggtcagctcttttcagggtagtctgttgtgttatctgactgtagatgatcaagacacctcaggtatgaggtatagagggagatgggggaaatgtgtggcaaggtcaccagtctacatagactggagggcagaactgccagaactcagagcacatgggagagtatagagcttgttacaaagggtgattctggcatagcttgggtggcagaaagggttcctgatgctaccagacaaccaccttatatcctggggctggatactgatgagggatactgggtctatgttgctgccttgcaccatgctctgaataagtgaagtagatggggactcttgttacttctgatggttgcgtgagttgggtgtgttggcgttagttgccctctcagatagatcctttcccacttaaaaaaatgattctttcccctcttcttccatgctcagatatccgtgggctccaaagcttcctggatcaggcctcaaggctgggtctggatgtctctttacaaaaggtggacaagaacatcagtcacgtgttcactagccttttcaccaccatgaagaccgaggagctgaatcgctaccgggacacactgcgccgtgccattctactgctcagcccacagggggcgcactccttcatcaatgaggtaggtcatgggatctgaggccattcatgcctgatgctcaggactgctgaatggcctaagtgtgtaccagaaacaacagagaacagagggctcagcccacagcacctaaccattcaggaagaggcctgaatgtgacttggatactggtttgtcctcagcagatgactcggttccttcacagaccacgaggaggctttgaggctggtgagaagcctgcatatgttactgcctcaattctctgagttgaaacccagcatttttattccctttaattttcttttgtttgttaacaggtatatacctatagggatggaaggaatttctagctctctggagaagtgggcaggtgttccgtgggatttgttgacatgtgatggaggtatctgttgcatatcaacagtatcaagcaatccctgagtgagcattattcttaggtgcttggactgatttgtgtgtgcttcttttaagaacacctctattagggatggagactttctaatgaagacaaggagggcccaccaatttaacaaagaatccattaatttgacatcaggctaggaaactgtggactagaatgagcaccattggtgctggctccagaggtctcatggcagagaggcaataaataggaggtagttgctagtcactccctagggttgagtttgtttgggcgaaaggagttactgggggtatggtgtgtctgggaacaagttatggcccagtggattatgggatcatgagcagtgggatgatcccccagggtttctcacataacccaagccaacttggccggcccactctgattgaaggtaaaatgaaagagaatggcagaattacactaatttcatctgatgtactttgcttgcttactctgctttcccctctaattaattatcattcaaaatgctacctcatgcatcaggaaccagcacgaagcccactgctggagagcttaacattggaaaagcttaattcggtgtagttggccagcagccctgccgctctcagctaatcaggtcccagttgtgctggtggtcagccaggctgtgctgtgctgtgggttctcagcttcctcaccagaactgtcgtctctgcacgcagcgattcagctttgcattagccggactgacatggccagcctttccccgaatgttcccagtggtgtatttgcagaaggctgctcccgggtgactcttctctctgttgtttattgccaggctcaggctccgcctggggagagcgtccacagattctgctgccagcttcccagcttctcactttcgtgctaattccttggccttcctgcttttccttccccctatgccactggcctgctgggaagcttgggagaagatagaccatgagctttgcagttatgtagatttggatctagtctctgatctagtttttaatggtgtgacattgatcaatttgcttggtccttgtagcctcagtttatgcatctggtaagacagtggtgaaagaggaggcagtaatgatcagcatttggtaccaagcttcttagcatccatcccttttatctgcacatacatgtatattttccttctccatggatctaggcgtttcttgtttctaggccccagaaggatttacactcaacgacaactggcctaaatatgttatttccaagtgattaattatgccaagtcctgtggtgcagggcatacttggcttggctttagccagttgtcttttctaatccttcagactgtgttcacaaatctttgtgtctctgggtggttggggtgagacttccaccagagtggcttcttccctcgtctggagactgagtgtgagggtaagctctggattttgagtcgaaggacacacctcctctgccttttctttcagctcctatagtgaaagtccaggatcattgtgatgcctttagaaatggatgacgccatgtcctcctgatgcccacagtgggcctggccccttgtgttcacttcctctttagagcacttggcaaatgaggaaaccaaaaagcagatgtcaagtaatttgtatgaagtcatttattttactaagagatggaaggagttccagtctaggtatggccagttccagagtctctcctccatgcttggtgacttcagaagacatggtgtgctacactttctgtcatggacacatgcgtctgtctgtgccagctctgtggaggaagatttgcctgaaagctttcctcgcgcctcatttctgagagccttactgtgtaaacatagatggcctctattgatctgaaggctggaggaggatagttctgtccagctgtctgggcatgcaaatcatccaaaagatgggaactcactcctgtacagtggccttggcattgcccagagccattgctcctcaggtagactgacccactttcccctttgttagtgcaggatagatgagtcccgcgagggtgacccactgtctgcattttatgacattctaagcactgtaaggtgaagtaaatacttctcagccctacaggacagtgatcagggctatggtgttggttgggagggcacagaagagctatagtccatggtggttgtgtgggcttcccagttgctaagcctcccttctcccttccaggaagcatggctgagtgggaggggatgaggacaggtagctctgctggaagcttacattttttgatatgtgaatctgctgttgtggctggctgacacctccattgttgttagtcagaagccctgccaattgggacctgccaggctgtcagtgaaccaagttaggagctgcttctctaaatagtcaccttagtgaagcagatcagcgctacccgcccttggcctggaggttacatggcatcactggattatctgtgactctgcatcatgagggacagtgttgcctggggctagcagatgcccagactctggtcttgatgattccaggaagttggtcagagactgaggccttggtgcctgcccagggctctgtgggctcatggacccactcccagtactgtttaccactcagtcttgattccttgtcctcacctctcaggagtcaggctcaccaatcatgatgttaatatattgtcttgaaaaggtgcacgcctttaatcctagcactcaggaggcagaggcaggtggatttctgagttcgaggccagcctggtctacacagtgagttccaggacagccagggctacacagagaaaccctgtctcgaaaaaccaaaaaaaaaaaaaaaaaaaaaaaaaaaagtaatgagagggttaagtatttggcttggtgtagaacagttggctagcatgtgccaagatgctatccctaagacaacagtaaaatagaaacaacaacaaagtaaaggcaatgagaaggccctacgctggagcagctgagtgtggaggagaagcatctcctggagcagctgagctgggaggagatgcctcctgaccctgatcttggaaggatagtgtcctggtattcccatcccatgcctgtgatcaccacattgatgtccttggggcttgctaaacactttcttcctccagcaaggcttgctgtgttcagctcttggccttggagggagggtggctcttttcagtcatcctaactagggagaagattgggctcattgtcttcccagtgaggctttgaccgctggctgttgaatggctttagtggattttagtaagtttacctttgatgttatcttcactcaaacctgtcagctggctcacaaggtggggaggtgggtatggtcctttttatctcactccagagcctgtaaaactcaagtaatgaagtcagaagcttccaagaagaactaagatcagggccttgccctgggaatcctgttcaccaacagcttctgaagttgtcctccactcacaccattccatctgtcacatttccaggtttaatgagccctccagtactgtgacttggttcctgtttccatgggactttcttcttggtcagggaagatggaggtatgaacagctcccattatctacaatggcagaaggatggagaagtacctggtagcctgggagacatagccgcagtgcccaggaggcttcctggactcagcaataatgacgctagatctataggaaggagctggcagtgagtgaatggatatggagggtctgatggcggatggatagcttagcatctgtgatatgtgagagcagaaattgatgaaaccaaggccaagctgatgatggctggaaggttcctgagtcaggatcagggacttgtgtcttcctgttcttatccctctgtgtgtcaggtttgatgcgggagaccagctctccactgccagtttgttcctaattggctgtgtgttttccatttgttaccaagtctatctgccatctacccctccatctactcaatcacctatgcaccacactgtctggtgatttctgcggatcaaggaccataccaactacgagaatgcaggaactaactagccttttccttgagtccacctgggccacatgctacagggcaccctcaaggactaacagagaggacatgacctggggctttcacccactgagactctccctgactgtgtgggttcctgaattttgtcttttcatcacatcattatgggcttctgcttttggctgtttacagtccgtctctctccttcacttattctgtatctccttctctttccatcttccttgtctcattagaaatgaaagactagcaaaatacactgtgtagaagacagttgattgatccttgttcatgatgacaggcacagctttcccttccccagtgcctgtgtgttcccatctctgtgtcccataaaagttgggcattctctcctttctattggaatgtaaatctgtaagtcagcggctgtgtgacacttgctcttgtatcttattagagccccccaaacctgcccatccattagggaaataagtggcattttttaataaatcattctttctttgtgtagaaaggcttaaggtgggttttccttttgcatgttttggctgcttctttggttgctcagctgtcctagggtagcttcttaatccaggactttggtttgaagatttctgttgttgagaagacttactcttaaaatcctactctaggtcaggagagatcagcaaaccgcctaggctgcttctgtaggtgaagtggccctggcctgtctgtggtgnnnnnnnnnnnnnnnnnnnnnnnnnnnnnnnnnnnnnnnnnnnnnnnnnnnnnnnnnnnnnnnnnnnnnnnnnnnnnnnnnnnnnnnnnnnnnnnnnnnnnnnnnnnnnnnnnnnnnnnnnnnnnnnnnnnnnnnnnnnnnnnnnnnnnnnnnnnnnnnnnnnnnnnnnnnnnnnnnnnnnnnnnnnnnnnnnnnnnnnnnnnnnnnnnnnnnnnnnnnnnnnnnnnnnnnnnnnnnnnnnnnnnnnnnnnnnnnnnnnnnnnnnnnnnnnnnnnnnnnnnnnnnnnnnnnnnnnnnnnnnnnnnacacacacacacacacacacacacacacacacacacagtgggaaatgtacactgcagtgtgcacctgcattaactagagtggtgacctccaggcagcagagtggtctggggcagtctttgcaatgctgggaagggaaaggcagtgacagggtggcaatggcagcaggtgacatttacctttgtggtgagtgaggcaccaatggactcttttgcagtagaaggatgggaggaggattcagggaatagctgcaggggcaggttgtcactgctctgggaatgtgtggcaccgcttgctcaggctgggcaaaatatggagggcagcaaaggtagaaagggtcccgtcatgcatatctccactcagcttggcttcctgggcggacagcagggctggaggctgacttaatccttaatgcaagtgggttgactccaagcaatttcttttctggttctgctgctatgagcaaagcccccacaatctgcatagaaagcctttttactacagttgtctgcaaaggtaaattaaggaatcgcagtactctgttgtcccacgtgacatgtgcaaatatctctcactccaacgcagcaaatctctagcagacgactttatcactcagagctagcacaattccatgccatttaagtatcatttaccaagatattttaaattactaattaattataaaagattaatttttaaataaggccccacatttgcatttaattatatcccactgtttatggattttaaaggcctggcactttaacaaaagtgctgtgaattggagaggttcattgttttctgtgagaactttagaaacaaaatcacgaggaaaagtcatttcctcgtgtgttcttgctggtttgcagctcagtagctgtgagaggaaggttgatctcagggctctgctgtctccagcacgcacctcctccatatagagctggcttattagctgcccatccactacctgctatggtccccactctgtggcctagaatgttatgtataggacaggaatctgttcccgtctgttaaccccattttcagggtgtggaaaaaagatgattgtaggatccaagaaacactgccttctgaccccaggcaaacattgtttagagcctcagataccctgtgaacatactgtggtggtttgaataggaatggtccccaaagacttgtttgaatgcttcggtccatagggaatggcactattaggaggtgtgcttagatatgctcaagctatatctagtgtgaaacacagcctccttctactgcctgtggatcaagatgtagaactcttagcttcttctctagcaccatgtctgcctgcatgtcgccatgtttcctgccatgaggataatgaactaaacctctgaaactctaagccagcctcaattaagtgttttcctttataggagttgccatggtcatggtgtctcttcacagcaataaaattctatctaagacacatagtgaacacattcttaatgtttttgccaagcagaagcacctgcataaacctgactttgaaagaacttaatgtttgattttgaaggagattccaagcaatcatggagagagaaaatgcatgaaactcggtggactttggtgatgactctctgctgagtgttgcttctggtctattttatcttcattcttcatgctcagggatgcccaaggaagctgccctgcttctccatggggttagagagatggaagggggagaaagaaggggtaggtaggggaacctgaagcatgggcatgatggatccttgggttctatcttttgcaggtcattaaatagctgagaaaagttagtcttccctatgtcttatttgcagcttgccctttcatccagaaggcatgaggctggaagaatagacacaagtgttggcagctggctgcagctgaaataacttagttaccctttttgtaccttagtacccaggtactaagaattttcaggttagaaggccttttctgaggtagcatggatgaagaggctagataagaagcctggggtgggggtgggggaaacacataggaaagtgttatacagggcagaggtaaggagaagctgtgtgaattggcatggacccacttcaaaaaccttgtgagccatacagcccacatctggttcattgatctgcacaaggtagctcccagatggaacctttatacttgaaactggcaggaacttgctatcggtcacttcctgtctgtattgggccaggttgtccaccttgagaggagatggactttgtatcagttagctgatgctgtgtaatatacattctagaagtcagtgtgcttaagcaacagtgtttagttgttggtcagtagatctggataaagaagactgatcagggcacataaatacctctggctctctcatgaggatgatgctgcccagctgtggtctgaaatgatgggatgaccagccacgggtcttttatcagtaggcctgtaaactaatacatgtttacatgacagcagcagagattcagaacaaccaacagagatgctcagggctgctgaaactctagcctcagaccttgctctgttgcttttgctccatcctcttagccactgtgagccataggatcagctgaatgggcaggtgtaagagactctgctccttgagttacatgtgtgaagtcacatggacaaggaaaggcagtgcatggggttggggctaatccatcatcaatctaacatgcagatgaaagacaggtttcccacctgagggaaggaagagggttggggtgaaattgggccattgccttgttttcttatcttgtttcagcgttgttcagctttggggtgagagtggtgaaagctggatagaatgaagagtaatggctccagtctttatgtatcaagttggctttttgtggacccagcagctgactacattgtttcaatgatgctagaggagcagggctgtggcagagcagggagtgtgtgtagtgagctgtatttcagagcagcctgtctccaagcccagcactgaacactatgtgtttgtgggaagagacttgttgcccatagcagacgaagaggaagccatcttttccctaaatctttgcagagagccttttatgaatatcactatgaaggagaaagtgatataggaaaggcacactggacactttgtgggaggccagagtatcattcatgggtctgtcagtagagctgggtcagatcaactgagagcttcatctaagggggagggcccctctcacttgctcccaacttgtcactgaaagagcagttttcttgggaaatcctgggccctaaagaacatttacaccttccttctgtttaggagtaggggcaagacatggttctaggcagacctgcctcaccatctccttctataacttccctagccttggtttcccattagcatgatgagatttccttcctctgaactattagtttagcctaagaatcatcagtttttcatgaggggcagttgtaccccttcctctgactaagagtctgtcatagttctaggtggcttggaggtacctgtgactattgtatgaacggagaatgaggatttgagaacatgtaaagctatggtgcatcaagggtgtggagaaatatgctagcttgtctctgagcaaatgcagtgttaccaatttggttgtatgctagtgcttgccatcaaggccgtgactgtgacctaccactgagatgctggacctggagagaagtggttttatttatttattgatttttggtgggctataagaggtacatctgctacttactccctagctgtggatgggatggctcagcatctccttgggcctagttcactatactccatattgttagctatgttctcttatgtcatgatgttagggaaagggcaaccaaaaggcattgtggtccatgactgcaaccctggagcttgggacaaaggagtcgctgcttatatgagacaaatgcaaatacgagagaaacaaacatagcagtggagaatggaaggggttgtttacccggagaaacacctacgtgtctactatataaggaacttcgagacacttggggcatgtaggtaggaaatcgttttctaccacatgaggagtgcaggaagtgaaatactttaagttaaatggtgacagagcacagaagactaaaaggcatccttcctctcatccacatcacctattcttttatctaccaaggcaagctgaggtttctgaggccatgggatgccgttccaggagctcaggctgaagcacagagcaagtggcctgtccttgttattgtgtccttgttactgtggctttggatggctattggttgaaatggtagaaccagcttggggctgccgaggtcaaggaaaaagtgttaatggcccagagaaggagaacctgggaatattctgcctccccgctgactctctgtcaggaagcatgactcctggaaccgggtgaaggagaccagatgtgcttgcagctctggatgttgagggaaggggctagcaagaagggacagaccatttctggtcctttgccatccagttgagattgagaactgggctgtcaacacttcagaatgttctcagaaaaaagcacagggaatcctggagaccttaaaggggagggaatctcaatgttcctaatgctccagatgttgcctgggatattacagattatgtccccaaacaggtagggtcatcttaggcccttttccatctgaactgtcattggcccatcccactagagttagctgtttcttggcattgcagtattgctggttagcaggcatatggaaagagagatgtccacgggtgttttctgtctctagtgctacttttcctgtgtgaaggaatctctcaggagcctgccaatgaccaggctactaccaagacacagtgggcttcatccctaggccttttagggaacagacatggtctctgctcctaaagagatgccaaaccgaactagagaaacctatactaaaaacgatcaatgagcctgggaattgctacccatctgtaagcatcctgttggaaattacttcacacctatcaccatactggtggtggtggggagctgtgtatcactgttcttctctgtagaatcttgtggctagggaccgctccaatgccagcagccatgtgaacttccaatgggtagttctccaaatggaagattttgagaaaagctaaagaattctgagaatgaataaaatcaccctttggaatgataggtataatacaaaccacagatttgcatgcctagggcagggttaccaatgcatggagggagcagatgggtggtgagtttagttactgcatcagtggtaaaggggacaggcagtaagcaaaagtaattgaggtaatgatacctgccttaaagagaccctgggggatccaggatctatgctcatgagatctgaatgagagaagttggagctaggaacaccagcataatgggtgtgggaaagaccatcctttcagtctcagaatggaatagtgtcatgcaggaagctgagggcatttcttccggctgtctattgttatatggcaaaccatcctaaaacttagtggtttggaaaagctataatcattttatttactttcattctttccttgggtcaaaatgcattaagggatcagctggacagttttgtcctaaagtcagccatgggcccatagttagagctggcaagaatgagaagctggagaagctagagaagctggagaagctggagtagctggagaagctggagggcaacggaacaaccatcttcacgtgacgtttctaatattctagttttgatgtttttgccacatggtaataactttttcatgtaattgaccagagttcaaatataggtgatctgtcacgctaaagggaagcttaggctgctcctcactggcttctggagggatgagtgagaggatgggttagagtggagacgttatgtcatgcatttggactttgtggtgtgagcattcatgatgttgccattagaacagcaatctgaaattcactgtcaggaaagcagaaatttgtgaaagcaaaaaatgaattccctgtgtatgtatgcatgtatgtatgtatgtctatctgtctatcttccttccttccttccttccttccttccttccttccttccttccttccaaaacaatgtcttactatagccaaggatagccccaaattcttcatcctccccctctgcatcttgagttctggattgcaggtgtgtatgattgcagatgtgatgatactgcacatgaaattgcaatctttggagcaatactcaaagcaagaactgtgagaaacttggaggggaggaatgtggtagagggatggaggctcagggtgaggcggcaggtttccaaagagagttaaccatcttttctctgacttgactgtactgtcttgtcaaagcttctgagggtccctcattcctcctgggttccctttacatgatgtaatggaaggagactgaaatcaagaaaggatggattcctcagctatcttccaaaatacctggaccaaaattcttgggaatttctgagagcaggcatatattttcacagcagcattagaaagatagaggtgcagaagagcccagcctgaaggatggtggtaagtagcagaccagatgttctgcttggcatcatttactccacaacaaaggaacttctcagttaaaaatcagtatttccaagccaagctgggaaatcatgaagttagagagagtagttacactaaaggtaatatttaatttttatgtccaaactagtgatatccagacattaattattctattataattaaatctagtaatatgctacattgccatataatgggatgtcgttatataggactcctgtgaggttaatggagtcctgaagaataggattcaaaatttaaaacccaggaacaaaagcccttcattgaaggcagtgagttttcagtttgcctcctccacccatggtcattcattcatggcatgagtaagcatttgttgctgcccctctagcaagtaagacagtgcagtgagatgcaagtgtagggaccatgagggtgtcctcctccaaggctcacacacctgttctggggtggaagaagatctcgtaggaagcagtgtctgaactgagctttaaagggtgggaggagccaacaaggaagaatggaaatgagaggccattcagcagggatgtagcagcagggctctgggtgtagaaggtgagtgactatgtgagcaatagattttctaatatggcaacatcaagagagacatggaggaggagggagaggaaggagaggagggagaggagggagaggagggagaggagggagaggagggagagaaggaggaagaagaggctgagcctggaaaagatgttttgtctgtgggagcctggaatcaatccttaaggtagcaagggccctcatagcaggactagcattctcctcatgcttcagaaagctctgtgtggcctctggaagtgagcttggctggatgggatatgataccagggcaaggattaagggcagtaccaacccttggatgagcactgctgtggcactgagttaagacaaggtaaccagggaaggaactatttcaggaaaccatttagaaatgtattctgtagaacttacggtgagactccatttcgttttcaaacaaaattctaatttcagcgatcccatcttattttcctcattgttagcattttgttttaatatagttgtcattctgagtgaactaacattttttacatcattaattgatgtctacagtccatttatattgccttagtttttaagcctaaagttatcccccaaattttggatgcttttaactctagcatagaatttcctgtgttagaatttatataatattttctacatgattggagttggaaagaaaggctaatgggtagacgagtaccattctcattgtgtcacgtgaaagagctgcatgtactgtaagcttggcttgccacttctgacgttggccctatcatctgaccaggacactttaaggtcactgtaatttcttcttttctgtattgtacctttgaagagtaaccctgcctgtgttcaacctactcttgagtcaagtggtatctacataagatatttggaattcttttattaaattaatttttaattaattcttttatttatttaccccttccagatcccccctccatgagcctcctaccttctctttgcctttaagagtgtgtttcccatcaacaccctccccttcccccctctagcactcctcttctgtggggcatcagcctccacagaaccaagtgcatcatggcagacaagaccagacaaggaagtcctctagaattgtggaatccgagctatttttgtgaggcagtgttggaattgtggtggttgtgatagtaatggtaataaggtaatgccatttgtaatagcagtggttgccatggaggcagtggcagttgtgatactgacaattgtagatgtatgttaatggtgatagtgctggcaacagtagtagtggctgtgatgtaatggatggtatagtaatggtaatagggtcatggtggtggtggcaattgtgatgatggtgatgtcagttttggggatagtggtacttactatgggggcagtgttatggcaattgtagtaatggtgttagtggtcacagtggtaagatcatgatggtggtgatgacagttgtcacagtgataatgacagttgtcatagtgatggtgatagtagcattggacaggatagccaaaaagcattacttttttttttaacttaaaaagatttatttatttactgtgaatgtgtgtttttctgcatgagtttaagcataccatatgcatgcagcagactgtggaggctggaagaaggcatccaagctcttggagctggaggtacagatgcttgtgagctgccatgtgagtgctaggaactgagcccagctcctttgcaagggcagtaagtactcctaatggctcagttagctcttcgggttctaggaagaaattcctgaattttcttgagaattcttctatgagctatatctgctctctggtacctcgctgcaagggatggtcagttgctggcgaattacagacttgagctttcatgggtaaggctcagtccctgctgagcccttgatcttgcctgtgagatctgtcttgaggcttgaggtctactcctcccctcataattaaggagaggaccgtggacttagttcaagttacgtcaaacccacaagcatttcgcatatgtagcagacctggcgctctttcttagtcctttaggaaagcctcatatgtaaggcatcatcttcctcttataagtggtctctagctccttggcatctttctaaatctggccaaatgtctagcctgttccttctggctacttgagacaggcaactcctcatagttggactcctttctgagtatgtatctttggcagggggtgtggggggaacagtccagagagcagccaattgtcattgggtgtgtatggcacatttgaaggcagcagcagatagaagaggtgagcaacccaatccttatgctgatttgacttgcaactttttgctttagtgtgagagctatgtgcattcggtagcactgcacttagcattgtgcatgctgatctcttctggggttagcgtggcatggtaagatatactcctgctgttggcatcaccaagtcttagctcccagagtggccatgggctctgagagagagaggaaccagtattgtacatgcagtgctgctgggcttggatgggcagcaggttgggtgttctaagagcatttcccactcaggatgtttctaacctgtgatgggtattatcaggacataacatggtgtaaagcctccactggggtagtattagctgttaccattctcagcacaggcagaagactattaggactttgggcgcacaatggtggattgaaagttttctttcattcatttatctattgtttcattcatttgtaattcgggtataaatagtgatgcctcatgtccctgtgcctatgtagagtcacattaggaaaaaggaaaaaaaagggcgatggcatgttattctttaccattattctctgaagaatgttgagaggatccttttcatagcaaagcgacactttctagaatacttttgtcttgtctctctcccctttgacactcacaagctgctttctccctgaactccccagatatgccacatttcacagccaacatgttttggcttctactcctcctttctctttctgtgtctgcttttcaccttctttaaaagcccaggaagacatgcaggcacccgtggggggaggccgtattcagatccacttttctcctgctcacaggcatttagtacctccttgcatctggtgtcctgcatgaaagcatctgtcctaggtgaagtgaatgaggctttactgtggcttagtagccctgggtctgcacacgtttggagcaggaaaaatgaggaaatgctccagctaccagcttctctctgaatgggtcacagatcagatgatgcagcagaaaatggagcagggctcttattgggtttttgcctgagaaggttaagggactctgttttctgaaacgatgggagaagaaaaggcaggaagtatttagaatgtttctaaatagacaggtctataatcagaggatgactgcctgaccatcacgggtataggtgacagtaattcagaatgtcacattagttagacccactgaacaactttatcttcctaaacattgagtattaggctctttgtctgtgggacagaagtcatattctccccttgcaggagtatgggaaggataaactgagatcagccatatgagagcaggttatggtgctgtcatgcctcccatctccttccctgcttgaatccctggataaaagtgcaggccatacattcaacattatctgacaggtatctgcttctacctggggcttcatagaggttgtccttcttggagcctccaggttacaccttagcagactgaggttcatatgtccttctcatgcctgttgggcatgtgtattctacccaataccctagcacccccctccaaccccgtgaggtacctctggccagaatatgagtctctgcccttcttcagagggtaatggcgtagctgtaagactgagtgagaagaagccagctagagtgctctggactcagggacttgggaggatgctcatgtccctgacacaggggttctactatggcctctgctggcagactgctggagatggtgaactcattgatgaaggaaccatccctctgctggatggatcagtgtggagaacattcctatatccatgattgatgggccagcattctgggccctcaccacaatctcattgtttctttcccacgatcctctcactgatctgaaggtgaaatgcactcactttgtgggtttcttgttgctgaacttcaccattttccctactggtctcgagtaagtgctggggtctggtgggcaaccaaagaagtgaggtcttcagagctacagacatattttaaatgagagggaggaagaggcagaaagcactagcacacggtgagcagtcccacgaggaacccaggtccgagcgtggactggcctgccagaggtcactgtcgggtgagcagcagcctcacttgcttatttcctaactcacgcttgacagagcctttggcggtgttgctttttaaaaggagacctttgtcattgtcagggcccccaggtgggaatatagcctggcatgttgtgggaacagaaagaatgctgacgtggtctgagctgaatgagaggcgggtgggtaagtctgggagggaatcccaccgaggttctgcagcccaggcgaggactgggggctttgtttaaggtgtgatgggaggtcaccagagagtttaaaggtgtgatgacatgacccgttttttttctgtttagtgagccctctggctgctttgtatagaggagctgttaagagtgcaagggtcggaacaggacaactactgtacactacccatgggggagacttgcaagatgtgacttgacacgtattgcacagagcagaagctagggtctagtcttgggcaagggttgtggccaaacaggtgagggaggagagtattggatggcaccacctcaccaagaacccccctcctcaggcatctcagtgctggtggagaattagaaaacacatccctggaaactggtccttcattgtcaccggcatcactttgtgctgtgtcaaaagcctgtccttcttaggagcaaggaagttgaggttagaggcggaggtctgtggccaatgcccccttcatactccgcgtcccatgcctccttgcctgtgcttgtcactgatcagggctccactcccgctttcattcttcacttgctgtttgtcatttttggagaaggatcctctctgttagcacatttgggaaacctatttcattgctgaggagaagggaacaatacaggttttcatctcagactaattatgcctccaatacactgatgctaaataaaaccaaggcgaaggtaattggaaaatcttgacgtgacattcacagcttcgagaaaaacagatgttcacttgaggagctgggaagagaatacatatccttcttgttggccaatgagatcagttctaggagattgtgagagaaagcgtggccagccctcagcctgcagactcggcatgaggactctctgttcaggcgtccatctgctcctggctaacctagcctggcccagaccctcaaccttggcaggttgctaattgaatgctgtgtccataactgggctgacaagactggctcttgtgatgagtcatctcagacacttagtggcagcaaaggtcatgtgatagagtgtctgactgcagcctcatacctgtggttcctcagttgtaggactctgagcaatggccacattctctgatcacccatgtccttgtgtgtgtgtgtgtgcatatgtgcttgtgtgtgcatgtgtgtgcatgcatgcatgcatgcgtgcgtgcgtgtgtctgtgtctgtgattgtgcccatatgcacagtgtcagagaacagcttgtgggagttggttttctctttccaccatgtcctgagaacagaattcaattcgtcagtcttggcagaaaatgccttcatccactgtgctgtctctttagcctcagtttgaatttttgaccattttaaatagcatgactgggtggctaggaaaacattggcatctgttagcctgggaagccataaacactagatctactccctttcctatgagcagcttcaaggagtacagattgtgtcgacccgttcactaagcagaaaaacaatgtgactttgacaagttcttttattcctccaagtctcccagttcctgtcaaatgggtaagaactcctgcctatgttcttaaacatgtttatagagaggctgaggaaggtctgagtccagaggaggttagagactggagctaatctgcatgagctgcagatgttctagaacatctttacgggtgaaggggggctgtggcccactgaatgcttacccccacttgttcatgtcatcctttaccagaccctggatgtggtctctgggcaggtggaatatagttccttgtccctttggctttgggattggccatgtgacttgctaatggtgtggacacagagataataatataccaattctgagcttgggtcacaggagattctgggtgtttctgtctctcttctggagtttctatgattttcatctttaggaagagaaggaactcatctttgaaaactcgttgatccaaggagaatgagaaacatgaggacaaagaagagccactgagctgagccacacacctacagagagaaactgacctgattcaaccatccacacatctcagaagacacgaagtttgtttcagctgctgtgttttgggaggcttgctatgcagcattattttggcaacaactaaccgatacactgggccatatttctgtgctctgtacttcttgcgggttgggaatcagagcatcgagtatagggttgggttgtgtatttgcatgtgtacaggtgcagagagcacatggtgggtgggcagagtagggtaccatggatgggatggctccagtggatgaaggcagtagccgtgagggtgaggtgcttactctgtgataggctctgtacatgccttttctgcctcacctgggagaaatcctgttttcgatcttgttttcacagctgaggagtctcaggcatatagtataatatgcatgtttgtatccatgagtatatattcatgcatatgtcagtgccttctcacatagaagtgtccagccccagagaagaaccacaggacctttgctgactgaagcgtcattcctaccaggcatccatgacagctagcatttgttaaggtttgtcacaggtcataactttttgtgtctttcattgtggtatcctctaaattcaataggtagtttaaaaaaaaaaaaaccctcatcttacttgttgttgttcttgagaatgtgggatgcaaagaaacatggattggtatagggtttggttggcagtaatctgtcttggtgttgtcctggaggacttcctacttacacttataaagcctgtatgttgtataccttaaggggcactattcagactatggccattatatctggatagctatcgggatgcacttccagcaaagagtgtgagcagagtagctatttaaggtgggtgggactgtggaactcctgtctactcacatcagactagaactggtagcatacagtgtgaacttgatgtcctggacagatgcaagacacatggatgtcagctccctaaggccttttatgtagttcatagagctaccacagacacatagaccatagtcagaaagatagaaagacagacagacagatgacagacaacacacatttgaattcacccactggcaaaacattgtggctatttcttcctctattgctctttgcgggtggaatgcccctttcacaggggttgtctaagagcattggaaaacacagatatttacagtattattcataacagtaacaaaattgcagttatgaagtagcaatgaaaatgactgcatggttgtgggtcagcacaacgtgcggaactgtattaaggatcacagcattatgaaggttgagaaacactggggtagtgggtcctaaacaaatgtctaacaggagtggtgccatcttgctgttgtcccctagccatagccatcccgagtaaaatgacccctgatagaaaacctttagtgctgagattcaacagaatacttctaatgtctcaacataacctgatggattcacctcaaagttattaggttattccaggaggagtccttgtttctattattgccccctgtaccacaccatacccacgaagcctttcctgcagagctctagctgtttggctctctgcctccaggaatgccaatcagagaatgctttgtttttcaggccatcaaacttggaagtagttggagctgtgtcttaagtttggtgtcagggttgccttgaggaaggagttacctgcaagatgaggagtgagcactgacaaactccatcccacctgggcagcaacactgatgctcagcttcggacttaggcatgccttgtcccaggctcgcaatcctgtgctgtatttgtgttggtattcactgtggggtatccaaatgtaggtgtggcctagcctgtgggtagctatattgtagctatattctctagcctccaggtcttaaatcctctagttctcaactgaccttcatcagttcattttcctctttatttctggtatctttcactcttttcctccattctccctcctatcacacccatcaattctaataagctctccctagacgccaacctctagccctggaacctccacactgttggccagcactcagtacttccctctgacttccatgacctcttagatgggccgtttgccctgtgtcctcatctgaccaataggcaccaatcagagaggcatgtggcttggttaagtgtgcagctcccgcatagagcatcaacttgaactcaaggtccctctccctattcccacccctcagtacaggcgcctcccccaactctcaagacttcacatccaagtaaggaagagctgcctactgcctgccactttctctgttattctctgaccacatgtacaccgcttttatatgtaattacttttaacctagacacaattttgtgctccgcttttctaacctaacatcctgccttaaacattccctgtgtggtctcaaagcctttgtaacagtcgttttaatgattgcatctagatgaagaattgatgttctgtagcttacctaatgtttcctgttattggacatcatgactgttccaatcttctatcaattgtttttgacagtggtaaaaatctgcatgggtaccgttttattattttctttgaattaattcttgaaatattctttgaatatttgcttaaagtttcctggagcatgtcggaaggtcagagtggggagctgcatttgatggataagcaccttgctgactggcacctgcctgttcttggctctgcaatgagaatgttagaggacgccattttcagtttgcagtctggaacacaagactttgaagagtcttgtctcgcatggctttctgaccctaagtcagtctgggctgttcttcacattgctaactctgtcgtcctgtttatctccccacggttgctcaggccagcctttcctggacaccttgctgtctgtagtcctgctagatatgaactggtacccaagcttttcctttgagctcatgtttcacactgcagtgatctctccgtcatatgcagtttttgactactgtcagtctcgcccactagattctaatctttgctagagagggagtacagctgcctctctcccctagtactcgacatgcagaatgggctttataagtgcgttcaggatgggaaatgcagcccccgcatgcccagaacaacactgataagtggcggctgcccccttccagctccgctttctctgaagaacattctctttccatcactgagatctgtatctcagaaggtcaggactcagattggagttttgtgagaacaggaggcaagcacggcaaatgtattcatagggctctggggagagcagatgcagaaaccagcagggcctctggaacagagggatggctcctgagagtgcctctgaactctgctgactggaaccctgggcagagaatccagagtctgggcctcagctccctcacatttgtggttgacatgcatcatgcccctctcagcttggggacaatgggatcctccctcaccccactgtcttcttgggcatgttaaacttaccctagtccttgcgttatcccaaatacctagtttctcgtaggtatttgggataacatttcttgttaaaacacagcacattcaactgaaaacactccttcaactttctgagggaaaaggtgctgagaatttaatccagatgttcagagcaactggaaatcactacttaaaaaaaaaaaaaaccacctctacctaattatgtgaataaataatgaggtagggagtgggtaggtttgatttgtcaggtagagtcatctcagcagccgagtgcaggcatgtggaggaggcaggggacctgtcaaagccctgtcacctgctgtaggctttgcttgcttccagcttttatgtgatatatcttttcccttcccattttcacctcacatcccaggcacctgcactccagcttgctttccagttgtgggtcatgtggacaggttcagtgcactgccataggtcccaggagattaaactctctgatacccatctggattcagtgagtcctgagtgtggtacctactgtagtatagtgtaggcgcgaatcagcaaccaaagggacagtgaggctccactatcctcaagactggggttgggtttggccagaccactgaagaagccatgaatggtatttagcatttagctggttgaggattgcttcagatgtgtgggccccaagctatccatgctgcttctgtgaaatattgctagctagggctggcctttagatttactgaatatggtggtcagatgcctgcatagctcgtccttgaagcaggaacctgtaaatgagactaagccacactggtgagtctgagctgtgcttctgatagattaggggacacaggtatgggagagagtgttgggtcttctcattatgttcctggcacccacacacgtactgagaccttgctgttagagacatgtgagcgtggagagtaagtgtgttgggtgggaggatgtgggtccaggtccaccctggactggatggcgactttgcaaaggcatggagatcctcctttctgctggtttagtgttgaaccctgtgatggctattctaggttgccaagttgactgctatgtagaatgaactaaaacccaagcaactgggtacacctgtgagaaatttttcttttcaaattaaattatttgaagtggaaagacctgtcctaaatctggatcttctaaggtgggaagatccacttttaatctgggccacactttcttctggcagcctgtataaggacctggacaaaggaagctgattgctgattgctgagtgcctgcctgctatcactgccattacggtctttggggttccagaatatactgaaggtcagctgagacacccagcttcatagactgaaaaaaacactggattcttggactttccattgtttgatggccattgttggactagctggaccatagcctgtaaaccactctagtaaatccccgtcctagatcaatatatagtcaatggatatagatcaatatatagagaatatcagttctgtttctctaaagaatcctgactaatacaagctctgttctatatttccctaagtctgttcttgctaactctgtaaagctaagaaagtgagagaagcagattgcagaagagctctcgccaacttccatgttagactggagcatgccctgtcagcatgtgcatgtgtgtatgtgcatgcgagtagtttgagtagactccggggtggcagtggagagccccaggcttgaggaaatattcagtggaaggagctctccttctggggcccaggatatgatgaatgaatatctccagagagccaggaacaccctgcagtgtgtggtcagtgctgtcaccggatgactaattcatttctagtgtgcaagacttggcccagcatgcttagtaatgactttctgcttcctccatgacatggctgggggagatggaaggtgatcaatatgcctgggtggtgatgcctttgtccttcccatccttgggatgtagtgtatgtctttttgtaaatgctcctagcgattgtaaacagtttataagatggctgagcagaatgtgagaagatgttaaacgaggagggaatcggtcctgtcctccaggaagatgtcacaggaaccagctgtgggatattacctctgggctcctctgaagtctcagttcttctctacctaggctctagccccctgttactgacaattgttcttgagatctgaggctctgaacattgagtcctgtagtagagcctccttcagtgatacatggagaatcaagccatggctactgaactgagggaaacataagagcccagaggctgtggttacctccaatcaggttgaagtggatgcactaaggacttgccttgctgcatcctctggcctctgacctcagggcagcctcaggaggcagagtagtggctctgtctggacctcctttcctggcactgtcttctatgtaggatacaaggtgcagaggactgtggtcttcttgttgacctttggctattgcttttgtcttcctcccttgaccttgtggactggttttgaattgcactatgggcctgaagctcactgaatcacctaggctaggctgggtggccagcgagccccagggatcagctggtctctgtctcccaaacctggggttacaattgtgcatactatacccagctttccccccattaattaattattatccactttatatcccaatcacagtgtcccctcttcccagtgtcccctataatcctttccccatccttctctccccttctcctttgagaagggggaggccttctactgaataccaatccatggtggcataccaagtcactgtaggactaggtacatcctctcccactgaggccagatgaggcagcacagttagaggaccaggatccacaggcaggtgagagacagggacagcactctcaccagttgttagggggcctgcatgaagaccaggctgcatttctgctacatgtgtgtgcagggggcctaggtccagtccacatatgctctttgtttagagttcagtctctgggggctcctaaggtatattcagcttttaaaatatgaattcttggggatcaaactcaggtccttatgcttacaaggcaagttctttcctgactgagccatccccctaacagtgtcctggttttgtaactgtgcataataagtatattcaaaatagcactcagctgggaatatttcaatgtccttctcttggagaacagattataaccaatagtacatatttacaatggaataccactcgctattgaaagggaacaaacatcacatcggtactcagagcacatgggcacacacagcacatatgctgagtgaaaagagccagactcattaaaagagcccaggactcatactttaatttcatgataatctggaccgggcacaccataggaacagcaaactgaccagtgtttcctggactgaggctacatgagttaagtattcagagctgtgaaggaaattcagtgtgtgataacactgttctctaacttgattatggtgttggttacatcactgtctaaattcgtcaatttcagggaactgtacatgggaaagaaatgcgttttactttgtgcaaattttacttcagtttaaacactgtactggtttggaggatgagttatatgctcagtcagtctttacagtcttactggatctggcaggttatctgctctttgacctcctctcctgtcattctcttctttcctccctacattctgggtgcctaggtttccttgctgttccttgaatatgttagaatagcccacaaatgcaactctacacatgtgtgctactctgcttggagtagcttcctagtccccttacttccttagagtctttactccaaagtctctgctggttgctcatgaccaagtgaacctcaagtctcaagtttatgaacatctcgtagaccactttaggctgctgtgtgagtattcaggacagacttgatgggctaagctttgagcatcttagctgggtgtagactggaggaacaccagtcacctaagggctattctattggttttgacaagagcagaagatggcaagtccttgcactattatgtgtcaagcctttgcttgtatcacatcagttagtatctgattggccacagcaggtcatgctttccctgtggggtggcatagtaaatatacaaagagttgcttatagctcccactaagcccttacctgatcaaactgctaaaaccctatgtcctagtttgttgtttcccaacctcctctctgcttcctccttctcctcaacatgtgtgactttatcacttattgtacattttgtttattaaccctacttactttatggttttttttgtttattttgttaatttatatatatatatattttttttctgcagtgaaagtttcaccggagcagggacaggccatctgttctgctcattccaggatctccagtgcctagggaaagctcaataaatatttgcttaagtgattgaatagggccatgctaagaatttattgatgtgatctgtgagctgtgtttgaagtagtcctatacacgggaagtgcacaataattggcggctgttattactctgtggagtgaatgctctcagaagaactagaattcagctatgtgtgtagtgatgatacttgcatgataaatctttgaagccaaatcttcagtatgatcccagagacaaggccttgaggtccagggtaggccatcacttgcccagagtcagaagcatctgcatttgctctgacacacagcatgcatgctttctcctgctccttcataccaggtattgggtatttacctgccaagccagatgatctgatagcattgcatatccagtttttttttgacagggagaggacttacatttaacctcaaacacccgctagggttcctcagggcagggcaggtacaatgcaggacctctaaaacaccaaaggctgcttcttgctgttctcagcaccatttgcccctatgggtagaaactcagggggcagctttctgcccacttggaagcaaccagaccttggggatggatggctaggcttgctggcagcgaagatcagatactcacactcgggaactgcatgactctttctgctcaggggaggggcacagagggagggcatgatggatgagaagtgggaaaatttatgagagtcattgcatttggtctgtgaccccctcatggatgacattggattggacgaactggattgtgctcaaatgtgaaacttcaaaaagatgaatttgaccttaagtggcagattctgccctggtaaatcaaagggccagagttgagccctctcagtgactagtagatgtgtttgctctgtcagtctaacagagcatttgctgtgtatctgttggtctccattttcaactctgaattctggctcctctgtacatccccagtgccccagcagtatcagtaattatttgtagagtaaaggatttatagttctgataccatggccaggcactgtacccagcttccggtctctattactttgctggacctttttgcctttcctggagaagatggcagttcttatcctctgcagaggcagagctgcattatagacctggactctaaccactgagttaccatcctcctggaaccaaagggcacgttctgctcctctctttcctacctcaggttatttggctttgaaagtctctctggtttggatctttactttctgctctgtaaagtgggaactgtaagttttattggttctctaaatagaacagttgtgaccgcccctaaaccccatgtgtgagtgtgcacatgtgtgtgtttgtatgtgtgtgtgtttgtcgtggtaaatctccaacccaaatatgccccagcaatgaaaacatgactcagttaatatgaatacatgctgtgcacctagattgggcagatctactgctgcactgccatcttccacatccttgttcgcaaccgttactcacagaagaatggaattaacatcaaatataattagccccagggttatccacaacatttcccccctttctgtccaattaaaagactattttatctcagatataattgaacataactattactattttgtaatttataaagtacaggagacctaacatccagtccatcatctttgttaattaaatagaacctctgtcatctagccttacttaaaagactatagttctgcacctaggtatttcttgactttagactgaatgccatctgaaaaccatcctctcaaatctgttcctctcaaagtaaaaagcctgggttggctaggagactatgcagttattcaaccccatcagaaatccaagaactactgatattaactgaaaatatataagaagcctaacacagcttccaaaacttagccaatttatagagaccgctgatcacttggacagtcccttacttcaacacattggtgcatcagtcttcagactactggccaggatcttctgacagatttagagaaacaggaatattaaggactagtctactatgtcttggcagaatcaagttgtcctaacctgtaattgtgtcctttctttggacagtattatgtctgcagatgaaatgaggcaattcttgcctagtggctattttgccacaactggagtaactcaaagatgctcagtttcttttttgaatccaagacagggaaagctgttaggagcagactggtctcaacaacaactgaataaataaccttaaacgtcacattctgtgggcttctgacattttgaaaaccaactatctatgtaaagtaatctgttgtctattaactacactcagccatttctgattaaaataactgaaaacaccctataataaacttagagccatgaatttcctacttggcccttaactcacaggcttaaacatctcaagtcggtttctaataacagcaatagaaggactgggtctaagccttgtacttcaaaatttttagtatcaaagacaacctataataaccaccccagccccaaagcctaggggactgggatgacgactcttcataacttcttcaagctgaatatgggtgttaagatatttttggagggggggggggaaaaggtagagaagatgggggaatttgttggccttaagaaggtcacaccaaagattctttctgatgtctgtgtcctgactggatccggatgaaaaacctagacatcaggagttcaggcaggtcagctcagcatgcctgatgatgaaattcaccaaggctgtatattctgtaatatataaatctcaaaacaaaattttagtatcatcaagataacctttttgtttgattcactggaatctagttctcagggggcctccctctatcaaataccttaaacaccttttccaaaaacacaaagacaaaacctttccccaaatcagcatctccttcagccagtaaccaggaaaacctatagctgccctctgtcccagaggaacaataaaacaaccacaatgcccaaaagtcacacaaattttagcctatttaggcctttctaatttgtcatgtcaggatattaacgcaaaattcccatggagcccatgttagacagaatatgagtctcctgcagactttattatactatctttaaaacaattgattcacacttatattttcctttcctttcttctttcctctcctttcttctcctctatcctttcctctcctttctcctttcctttgccctcccctttcctttttcctttttcttcctctctcttctcttctcttctcttctcttctcttctcttctcttctcttctcttctcttctcttctcttctctcctctcctctcctctcctctcctctcctctcctctcctctcctctcctctcctctcctctcctttcctctttccttccctttcttctcttctttcctttttccctttctttctatacctgcttataagaggcagctcatcaaaccaggatttaaacccaaaattcccatggagcccatgttagacagaatataagtcctgtaagacttattagttcaatatatatttatactatctttaaagcaattaatttaaactttcactaatatctacctataggaagcagatagtttttaattgttaagctctctacctagagcagccatattgttatactatctatctgttgtgttctctacctggaaccacagacttctattaattaatacccattcatagcaggcgatcattactgctctctctacttggaatcagtgactaatattccctatctggttctgaacagcaggtaaaatttcccataattaatgagctctctgcctagagcagccaccctgtctgttgtgctctctaccaggagccacagacatttatttaattaatacctattataatatctatctgttatgctctctacctagagccacagacttctcttaattaatatctgttcatagcaggtgattatcactgctctctctacttggagtcagtaactaatattccctatccagttctgaacctttatctcaatctcaggttagttgagttcaaattaatatgttgggcaccatttagttgtggtaaatctccaacccacatatgccctggcaatgaaaacatgagtcagttaaaatgaatacatgctgtgtgcctagattgggcagatctactgctacactaccatcttccacatctatgagaccccttagaactttcggtttctccaggccatgtgcttctgttctgcttttcttcttcctcttcttctgagtcctctccctctttcattttctccttcttctccccctctcaccttctaccccaccttcccttttatctgcccaatcatcagctctcctttattttacaaattaagatgggaggtggtttacaggaaatcacctgagtgctgactcattctttgttcaaagccactcacaggagaacggaattaacatcaaatataattagccacaacatgtgtttgtgtgtgtgtgtagtattatgtagatccaaaatgtcattggtagtattgctttacatgggagttaatgttagtcattaaggagggaaattgtaatagaagcatggcaaacagtttagagagaattaaatatactgatcttttccagtgtataagtgtgtaaagaacatgataaaacaaatcacaggaaaacatgcagcttgttaacaaacatatggaaaaccactaaaacattacttgtaatcaaagcagtgcaaattaaagcaagatggcatgtttaccatctagttaaaatacagccaggactagcaagatgttggcagagtgaagcactgtatgttcttctgtgccctgtagggacatcctgggctagggaatttaatatggtgtatatgggccataaaaatgtttgctctctttgacttgacaattctatttctagaaatatctcttaagaaattattcaatccaccaaaatttttctgtataaagctgttgaaaacagctcaccgaaaaaaaaaaaagtgatctgaagagtcacatctaaagaatgtggcaaaggaaactgtgctatgttgagtgacatatcctgaagctgtcccatgaacacttgacatcagatgagcatacaatgcataagggaataaagcagatgaaatactgcatttattgttttgttagaataggtgaaattctaaagggacattcgcatagaactaaatctagaagagaccaaatccaaaagagccaacaaggtttgcatgtttgtggaaggaaagtggcagcttccacactgtcattttaatagaaaacgtgtgcacttgtgaccgtattgacctgagaacccgagcagacctggatgcttcgggagcaggggtaagcacccagcaaagtgtgtcctcaggctgctttgactgaacagtgctttcatctgaatggatttgtggagctgataagtcacactggagaataacctctgcattgcattttttttttttgtaggcgaagatgatctgtggtttcacatttagctatttattactatctatttttcctaacaactaagccgaacctttttccttcgttttaaaaacttaaggggaagttttataaaaaaccacaaccatgattgactgtctctctcatttcagagataatgactactgagagttcatttactatccatccatgtttccccacatctatggtattatttaattattgcttctccttcttataaaagacaaagcttgggtgaaagtatctactttcattttcttttttcatctgcaatacatggtagacatttttgtgcatgctatatagaatttttagacaggtgtttactctcatacattgctgatgaggaagtaatttggcagtttttggaaggcaacttaacaagatctcttatgattaaaaggtttcaccatttcttcatgaacaccccataaagagctgtctgtcgcagtgttcacatggtagtattgttattgctctagctggctctttggtttatgacacattcagagaagtatgactctcgtgtcctaggcttcctgggaacagtgatggaagcttcctggttgctcagtgtgagtaaagcatcatgggttgacagaaggttcttgtgacttggggtgaacaggacatgttcaagtgcaatactcaaatataaacactgaacttccaattagagatggaagttagaattgagaagagacagactctctgtcaagcttgcatcatgtaaaaaatattttacattgctttacttaagagcacagggacttgtcgggcgggtctgcatccaaattgttgcccattacttaccagaccctacgataatcttgtgcaaatttcttaccatctctgaacctctactccctcacttgtaccacaggaatgctaaatagttgaccttagtgttatagagatctatgagcagaataccacaatactgtttcaagaataataaaagttagaacaatcattagtattgttattaatgaatcctggtacccaccacaggcttcaaatacaggggaagaaatagaacacttatacatctggtctttgagaccctactctggtactttagcccagccaaattttggaaaagaatatattatagactttttgcacctttggtctttgaattatgtccaaccctactgtgcattggcagaggggctgtttggcaaggtgatggtctcttcctccctgcacagatccaaatgaggactggtaaaaattcctctggatctcttaaatctggtggaagttagaaatatattataattgctctttcgaaaagtaaccttttaaaagatttatttattttgctttatatatgaatgttttgcctgcatgtgtgtgtggattatatacacctttctgtgggatcctctgaaacttgagttatggttggttgtgagctaccatgtgggtgctagaaactgaactcaagttctctgcaagagcaacaagtgctcttaaccactgacctatgtctccagcatccccatattaaaaaatttcaaagtatgcttctaggcttctaagtggaaggtgaactgccagtgtagttaaggccattgttgaagattctcttcttcctctggtgcacattctgcaaactgcagtaaatgtcatttggctggacttgcactggtttctgggctctctactctggtggtttagtctaagtgctgttttctatgcgatagctttgtagcatgtattgaagacgaacattgggctgcctccagctttatttgggtctcaggatttctttgattatttagacttcattggtagcttaatgggggatacattaaatctaaagatggcctcaggtagtggagatgttttagtgttaattcttctcagctcatgaacacaannnnnnnnnnnnnnnnnnnnnnnnnnnnnnnnnnnnnnnnnnnnnnnnnnnnnnnnnnnnnnnnnnnnnnnnnnnncccctctttttttttcctttgccttcagttccttttactaatgtcttgtgattttcattgcagtgataatttacttccttggtaaaatctattccctagatatctcattgcaaaggaggtggggaaaaccatatgtacatatgcagaataagatgactcctatcatctcactatataacaaatcaacccaaaatgagtaaaagacctaaacggaagacctaaagctataaaagtaccagaaatgaaaacagatgatgcatatcaaggcacttagagtaaagatttttcacaagccccacagagcatagacgcacagcaacaaaaaattggcagaggagatcatagaatcacaaagtatgaagctaatgcagagtgaaaaaacaaagtgaatgactgtctgcagaatgagacattcgatgagggattaagacccagaatacattgacactccaacaacaacagcaacaacaacaataataacaacaacaacaataacaacaacacgcaccctgcctgaagagcgagcatttatttcttaaaagaagatacacaaattgccaaagtatgtataaaaataggtttgacatccccagttagagaaatgttaataaaaatgcaatgagatgtcagtttacccccgttagaatggctgttatcagaaaggtaaataacaaatgctggccatgatatggaatatggaagcacttatatattgcttgggttgtgtaaattaatataatcacagaaaacttttatgtagattttgcaaatgctgaaaggagacttcccatgtaattcagcaaccctcagtacacatctaaggaattatagaggacctgcacttctatgtctatcgtggcccaggcagagtgccaagacagcaaatcaactgagctgtctatcaatgtataagtaaataaaaagtgaaatatataaatattacttagccataacacggattaaacatctgtcatttgtggcaacatataatgttaggtaccccagatgaatagacatataaacattatgggccaacttaacataaacgtaaaaaagagttatgtggaaatgcagttcattggctgatgaaatcacaacattttaatttaaacagttaatcagattcttattggtaggccagtgcagtgtgttttacatctgcatgcacagcaaattgccaaaaagttatggaaactgcttcctaaactgatgggattgagaaatatttctcccaagaatatcacgtaaactcaacagttttctcagcacacatcctgtactagaggcttgctggtagtcttttcagctctggtgttgagagttcatagcttactggtggaggtatcctgtagtgtgacacagcatcccagtcatcaccctgtcgttttgttcacgaggcagtgctctgcccttagtacaccatgactttgttgtggtctccctcttgtgcctctcagaagagggctctgggatggatgcatggacttccatggaacacctctcttgctggagaggtgatcttaatcaaaggataatatccattctagttccctgagacacttagtaatcctagaaaccagggtgtttgcttctggcattccagagggcttgtacacgtgcccttcaagcttgatggttggcatccaggannnnnnnnnnnnnnnnnnnnnnnnnctctctttcatttatttatttgagtacaatgttgctgtcttcagacacaccagaagagggcattggatcccataacagatggttgtgggccaccatgtgattgctaggaattgaactcaggacctctggaagatcagtcagtgctcttaactgctgagccatttctctagccctgctagaatttctttatgtctcaacttaaaaaacaaacaaacaaacaaacaaacaaaaaccatatgactcaattctcatgaagttctaagacataatccgagaaacccaaagcactttgctcactttcccccagggcttgtctttgctgagctgtagtgcaatatagagattgttgttcatacagtcagggtacaggtggttatccctactgctgcccatttggagctacatccactttcttgccaaccatacaccatcttaaaccctgtgtccactaactcattctccattttctgtcagtttaagaatgttctaggaatggtatatagcagtggctctccaccttcccaatgctatgaccctttaacacagctccttatgttgtggtgaccccaaccataaaataatttccattgttactttataactataattttgctgctgttgtgaactgcaatgtaaatatctgtgttttctgatgatcctgggtggctcctgtgaaagggtcattggattcccaaaggggccaagacccacaggttgaggatgtctgctatatagcgttgcagcctctggggttgacttttttcccccactcaacataattccctggggctcatggaggttgtagtgtggatccatagtccattcatttctattgctgagtactatttcgtggcatgatgtaatgcagtttgtttaactagtcacttaagagttgtccattttgtaccccaggctatggctattgtaagtgatgctggtgcgtgtgtttgtgggtcggtttccatgtgaacatgtccttatttctctggaacagatgttcaggagtttaattgctgggtcatatggcaattgcacatttcaattctcttttttaaaaaataaactgtcagtttcctgaagtggctttactgttgttctcatcaagaagcagcgatgaacaagtgatccagtttctccaggagtttttgttgtagctgttctgataggtgtgtactgacagctccttctggctctcatttgcattccctgctggctgatgatgtggaacacctttccatgcggtttgtgtctctccttcaagtgtgatgtccttcctgttctctaattggctcctctgcctttctccactgtggatgttgaatgtcccaggtaccagccttcagcagatgcgtctctgcagacatgtctcagcctgctgctgttgtctattcatccttttgatggggacttgaagagagtttttgaatttgcatccagtttatccatttttaattttaactacctttttaaaaaatgtattccaaagatatgctcctatttcctttcccaaagtttcttagatttagactttgcaagcaggtctatgatttactttgagttaattgttacacaggtgtgagacttgctttaggattttcttttctatttcttcttttttcttttgcccaagattatcttttttctttttgacctatggctgttcaattactccagaaccattttctacaaaggccccttttatggattgtttcgtgtttatataagtctgctctttctcatctgtcagcaatgtgcattagcgtctttactaatagcagtcagtcttcttgtagctctgtaaagtctttttgtttagagtagattttactctgtagccaaagcttgccgagaactcattgtatagttcaacctggcttgaactcatggcacctgtctgcttagcttcccacatgcagtgatccgccaccacatgctactgatgtgcatgctttgaaacccagtaggtaggttttctcatcatattttgtttataaaatatatttgtagcccttctagttcttttatgttcctgaatacaatttagattaatcttgtctgtgtctggaaatagtaatcttgttgcgattttggtaggtgctatcttaaacctctgtgtcaatttggatagaatttacattttaatatgctgaatcttccatctacaaacataatgctatgccttttgttggtctgaaatctcctttaatttcctttgtcaacatcatgcaccttccagtgtacaagtcctgtccattacttgctctttttccttccccctctcctttcctccttctgttcccccccccctgctttgtttcttcatctctcaattgcaaatgacaaatcatttattgaagggagtatatttcaagactagtgtatgcatgaaattgtaggtacacagttacgtttttccatctacataaatacccatgatcaagttagtttacaagttaggatgtttcccgttcccatcttttacctacatgtttagtgattttccattgctccaggcacatatcatatactgtaatgtgcatcagatcagtaaagtgtcacgtcctgttcaagcttaccgagaagctggctctggaagtgaggctacccattcccatttcagacataggcatgcttgtctcaaagggtcctttagtgtttgtctgcggatgggtgggctcccccgactctgatgggaaggagggaacagcagaacagcccaacagtaaaaacatcatccttgaaatcagatcgtaggtaagccattccaaacagaggtttatcttaggatacaaaagttcatgcagttcccagccacagagggagagtgtcatctggaaccttactcctcaacttcccagtgggctcttgttggatgccacgtgtgtctaatttaatgatgtcatctctgtctgcatatgttctttgacttgaaaacctccctcaaggaagtgctctgctcagcttcagactcaatagaaagtctatttggttgtccttaaaggggtcttgcccaggtcgatttgggctggatatttgagcacttggtctgatgaactccccccccccccacctttctctcactaggttttcactttggcttgcttacttaattaaactcactcattcaaaaccaaaatatgggaaccatagactgttctcctgatggtataaagttacagggctggaacttttgaagtttgaggtatggaaacaaaaagtgcaagtgtatttttttcttcttaaaaatttagctggtaggggctggagagatggctcagcagttaagaacactgactgctcttccagaggtcctgggttcaattcccagcaaccacatggtggctcacaaccatctgtaatgggatctaatgccctcttctggtgtgtctgaagacaacagcagtgtactcacatacattaaaaaacaaaacaaaacaaaacaaaacaaaacaacttccccaacagcaacaaaatgattagctggtagaagagccatacttattagagatattagcaacttgtgtattttttttcctttccctattaaatttagaacttttcctctttcacttaaagaatataacttaaagcttctctttggctgattcaatgcaaatgaagaaatatgaaggaatactactcatgtgtttggggccattttctaagtcaaacaatgatgtctggaacatagttctgaagagactatgacagctgctctgatggccactgggtgactagttggggtggtgtggttagcattacagcgtggttatgctggttagagggggtgattcatacctcaagtgggatggagcgggctgggtgagatttcacctggatgttcaaaacccaaaacagtgagtaatttaaaacttacgaatggttaatagatggcatgtttggcatcatagctttggactatggctgatgatagtgaatcagaactctgaaaagtgagcctaccaggagggagggtcattatttcatataaagatatgagtgacttatgtgtagattgaatattaagtgaccttgctgaactcatttattttttaaaaaattctttcaaaatttcttgtggttttcttcacaattgtaacattcacaaataggaataattttactttttttctccctgccaaactatatgactttcatttgattttttaaaaattattagatattttttatttacatataaatttaattctattgcctaaaatcctgaccagaaaggagtgacacagaatattcttatgctgttccctctcgatcgaggaacaaaggaaaggaggcctgtacttttgcttcagcctggtgtgatgtgagtagtagcttccttacagctgccctctggcaagttggttaagtcccctttctcctctttaggagagatctttaaaattacgaatgggtactgacatttgtaagatggcttttcttcattgttgcaagttatcatatgatttgttttcattttagcttcttaatatggtggagcgcatcaattgactttcaaaatggaaccatctttgcatccctggcatgttgtattgtgccttttaaaaaatatatttttgaatttcgattgataatattttgctaagaatttatgcatctatgtttgttaggatttaattttattgtctctctttatctttgtgtgatttattatcagagtgacattccttctctagtttcaccagcttctattttgggaaatattgtatcgaatttttcctaagtcaactgatacagttctttagtaaaaccatctataacttgctatttctgtttggagaattttaaaattaaaaaaatctgtttcccttgttagtttaggactacttagactatttatttcaggttaggcaaactgttctggctcatggcttttgagaaatgggttcatttcaaggaattagtcaaattaaatgaaaagtgttgcttgtgacatccccttattattcctcggatgttttcagggttttgttgctgttttattaccgatactggaagtttatatttatcttcagttctttatcagtgttgtaaattttattgagctttttaagcatctagctctgttttgcattcacccttacctgtaggttttagagcttccagtttcaggttttatcttttcttccttctgcttattttgggccttattttgtgccatctgtctgtctgtctgtctatctatctatcatccatgcatgtatctatctcttctaggttcttagtgttgaggcttgattagttggctagtaacttttttgttcttgttgcatgtttttaaatcattattatttaattattttattcatttatttacatctcaatgttgccttctctcctggtcctcccttgcagagttcttccccccccccctccccttcactgccgagagggtgctccctgctggcatcccccttcctggagcatcaagtctctataggattaggtgcatcctctcccactgaggccagacaagacagcctgggctgtatatatgcctctaacctcagacctcagagtagcccctgtatgttctttgatttatgggttagcctctgagagcttccagaggcccaggtttgttgacactgttggtctttctatggggttgccattcccttcagctccctcagtccttcccctaactcttccataggggtccctgatctcagtctaatgcttggctatgattatctgcatctgtctcagtcagatgctggtagagcctctcagagcacagccatactaggctcctgtctatatgcacagcatggtgtcagtaatagtgtcagggtttggtccctgcccatgtgttgggtcacagattgggatggtcactggtctgccattcattcaatctgtggtccattttttgtccctgcatatgtatgtgtgtgtgtatatatatatatatttattttattttatttattttattttatttttttgggacaggaaaaattttgcgccaaaaatttgtaagtggtttggtgtctctatccctccactggaggccctgccaacttctagaggcagtctcttcaggttccatatctccactgttgggcattttggctaaggttacccacattgagtcctggtagcttcccacatctcagatctctatgactgtctagagattcctccctgcactcccccacttcctacagctgcatatttccattcattcttctagcatctgggctgctttcctgtctccccatccaatacctgattcagctccccttttccatccccctccccccagattcctccccctttctaactcttatgattattttgttctcctttctaagtgggattgaagcatcttcacttgagccttccttcttgtttaacttcttagtgtctgtggggtgtatcatgggtattctgtactttttggctaatatccacttatcagtgagtacataccatgcttgtctttttggcactgagttatcatactcagaacaatattttctagttctatccatttgcctgaaaattttatgatgtccttggttttaatatctgaatagtattccattgtgtaccacattttctgtatccattctttggttgagggacatctgggttgcttccagtttctggctattatgagaaaggctgctgagaacatagtggaatacagcaaactaatagtcgacatcaaattaaaaggagagcaacttgaagcaattccactaaaatcagggtgaagacaaaaacaaggctgcccactctttcctttactatatcctattcaatatagtacttgaaattctagctagagcaataaaacaaaaggagatcaaggggatacatattggaaaggaagaagtcaggttatcactattttcagatgatatgatcatatacttaagcaacccccaaaattctaccagagaactcctacagctgataaagaacttcagcaaagtggatagatataaaattaacacaaagaaaccagtagccttcctttatacaatgataaatgggctgagaaagaaaccagggaaataacactcttgacaatagtcacaaataatatgaaatatcttgatataactctaaccaaacaagtgaagatctgtatgtcaagaactttaattccctgaagaaagaattcaaagaagacatcacattatggaaagatctcccatgcacatggatagataggattaacatagtaaaatggccatcttacccaaagcattgtagagattcaatgcaatacccatcaaaattctaacacaattcttcacagacacggaaagaacagttctcaacttcatatggaaaaaccaagatcccaggatagatagaacaactctgaatagtaaaagaacttctgaaggaatcaccattcctgacctcagactacttcagagcagtaggtgataaagacagcatgtattcatacagagatagacagatcaatcagttgaatagagttgaagacacagaaataaacccatgcacatatggacatttatctttgacaaagaagactagtgacttcttaaaatgcatgccttcagtgagtgctacaagttccctgctcaatgctgctttaactatatctgacacagttcaattcatttgtcttcgttttgttccaagaagatttctgggttgtttttgagacatcctctttgaccccaatgttgttttatagcatgctgcctggagatttttattattatttgtatgttattgattttcagtttgattccacagtgatcacaggacacagtctgtaaaagcccaagatttcaaacaggatctgacagttgaacagaatgcacattttgtttttttgagtaaaatgttcacaagtgtgtgttagatgctgttggctgatggaattggtcggtattatgttcttgatgattttctgtcattccctttttgtctctggcaatttcctttgctctcaagtattctttatctgatgttaatgggcaagtcttgatttctgatttcagtctgtttttctccctattactttactttcaacttctttattgttcattagagaaattttcctataacaagctgagatttttttttcttttcagtgcagcatagtagcgtatagttggccatttgtccttgttgacgtattcaagcttatatctgccatggttttggtgtgtgtgtgcgtgtatgtgtgtatgtatgtgtgtgtgtttctgtatgtatgcctggggaggctaggcagtctggggtgtagctagctagtgagccccagggaccttcctgcctctacttcctcaacattagcattgcaagtatgtgtcatcatgcccagctccttttaaacgtgggttttggagagtagaactcaggtggtcatgcttgcaaggcaagcattttactgattgagctgtctcttctgcctctgtacctttcatttcatttattggctccagttgatctctgtgctgtatgtttatttttcttgactcttttctgagtaacttgaacgttatttaaaattccattttgatttatctataatgttgcttagtgaacttctttgtctagcctttgaagtggttttccccaacttgagcactcacatatgcacccacgtacccatgcacccacgtacctatgcacccacgcacacagtctcattattgtctgctcattgccattttaccagctcaagagaagcacagaaaacttatctctcttttgtctttcttccttgcctatatataattgtcttacatatttattgcacttatgtgtataactataccagacagtgttataattttctttcaattgttaagcaaaatttagcaactctaagcagagaatgaaagtatataatacttacccttattatttcttaccacattctttcctcctttgtgctatttcaaggcaccttacttgacaatttcctttctgtttcgagtactacctgaagcctctctttaggttgagcctcctgacaccaaattctgaatgtattcatgtgtgaatgtctttattttgccatcactttttacaggatatttttcattgaatttatgatcctagattgcaggtcttttcctaaaaaatgttgaaaaatgctattgtcattcctatggaaaatgtcatgtcactccctcatgggaaatatcgggtcacctacatatgacctcggtggttctgatgagaaatagtttgccattccaattgttatttttccttgtaagcaatctcttgatgcgttcaggatttttctctgtctttattttatcaaatacttgtctatatgtttttgatacagatatctgtgggttttttctactcatgaaagcttcccgaatctgtaggtttacatcttttgcaaactaagcagtgcgggccattgtttcttcaagtaccttttcagccccaccctttctctcctccttttctgtgactctgatgtgccagtgttagattcttaaagtagcgatggttcccttaaagtctatttccccattcttcagattgggcagcctctactattagatcttctagttcattggctcttgcctccaggcctcacgccccacccccctgcatggagtcttatattgttatattttttcagtctacaaatttccttttgattcttgaccttctgttgaagtttctgttgtcttttggctcaaacatattggcaattgcttgttgaagcatttttttttaatgatccccgcttatacatggttgtcagaatgtgaatacatcttccttgttcaaatctattgcttgtcttttcttttcccatacagcttgaacttcttctggttcttaatgtgagtagtgatctttatttgaaacctgaatatcttggggacatttcaaattctgcttcttacttatttataacttatattttagctaattctcctagtgctgtctgggaaatcaatttgtttcctcataattatgaaatcagggtagacatctaggctgttccctggaattctgctgagggctagggctgggggcagggcttcttgtttatgctggggcacgtttgggagtatttcacacactgtgctgtgagagtatgtgtatccatgtgatttctatatttctgcgtagagatgagtgttctcatctatatgaggacttgtcagacaatgcccaccacaggcaatgagtactctatttcagccaggtggaagtggaaattctaggcttttcatttgggctttgtgagtgtgagtgaagccaaaccactatgccctgaagtgtctggctagacaccagagcaacatgatcattgtatccaagtctgttgttttggtggcctttcctcgagctagggctggcattacctggggatttcccatcatgctgtgaactgttgatgttgcagagtcttcaactatgaaatgcctgacacagaaaggaaactcatgatgtcattgcctttgtcatgatgtcattctttaaggttcctagcggcttctctgctttcttttctttcttccttccttccttccttccttccttccttccttccttccttccttcctttcctttctttctttctttcattttctttctttctttttttttttttttaacactgttgccttaaggctttggggcttgaggttgtacctagtggtactactaggacagagtataatgtctccagaagcaggttctgctctctgacctctgctaggctgggatggcgcttccctaagccggcatccttctagcaactccagatctagaacagcaatccccacatgctcttggccacatccctcattctttaagcacagagatacaaaattagtcaacagttgctcatttttcaagcctgtttaaagatagaattcatttgaatgcttaacaagtaaatctggcttctaagaaagtgtttaagggatctcaagtggaggatatttatttagttctacattaacacgtgtgatctctctctccctctccgtctctccctttttatttgctttttatcccattgttgtcttttaattaggcaattccttcacaggatgttctttcattgagaattattaaagatataagctttcttttatcaagctgtgtgctgtgcaattgtatacactttacatttgactctggggaaatttaggaattgtgggagagaaggtgcttcattaactggtggagcaagattgtgcctttaagcggagacaaagctacggaagtgttggtagggctgggacagtccgtggttgttggcgaggacagaggcagccagtgtcagggccttggcagacagttgctccttctgtgctgcctacagtacgtgccctgcatgaactgaaggacagtggggggtagggaaggctagtctgcacaggcctgcccaggggctgcaggctgcactatctgttagcagtccctagaatatgacaaacattaatatgaaaaggtgtggtgatcttttcacacagggccagtgatccagatgatcaagaggcgcggggcaggtgagggtgtggagggcaaggggaagctgtctccctgtcctgtctcaggtgggctgcttgttctgtgcttatgaaggtccactggataagaatccctgaaagtgagccctgagctttcctagcataagtgtagaagttatttgtctatttgagatacctaggaaagtggccagtaaagaagacagaaagagctgactttgcttgtgtcccacaggattttatactttggggatagaggcaagaaacacacacacacaatcacagacacacacagacacacacagacacacacacacacacacacacacacacacacacacagacacacacacacacagacaccactcactgagccctccaaatactcagctgtacatagccattattacacagatataaaaatcttagagatcactggtggacatgtatacagaaacaggattcatctcctaatagaaagctggacacagtaggcaggctacaggcagtatggactgaaggcatgtataaccatggaggaagaaaaatcttgtattgctgtcccccatgcacttaaatttattttctattctcaaactgcaactattttcatcttcagagactcaggtgtgctcattcccctggtctacacgtacagaaaagccaaggaagttaaagtagtaatagtttacaatgtgcatacttttagacttcacatttcagcaaaatatttctggcattccatttcagggtatgacctgaccatcacaaggtatgggaaaagaccaagtcccttatcttccccaagttcctggactaatagaatatagctgtatccaggcacttggtataggtacacacacacacacacacactctatccaagcacttggtataggtacacacacacacacacacactctatccaagcacttggtataggtacacacacacacacacacacacacacacacacacacacttgcacaaatgcacccctacacaaacatgcaagcacctgtacaacctggttttgtgactacctgtggactccgcagaaccctcagacagccatgattgttaagcaagggtctctgcttgattgtggactcttgagactgtttccctgtttcactttcatttttaaaacatagtgtttttattattttttgacctctactccttcattcttacctacccagcatcatcctctctctctctctctctatctctctctctctctctctctctctttctctccccccccctctctctctctctctctcccccctggctccggttctggctctggctcccaacttccctgcatcaagtccaatttgtattgcctgcatactcttgggtgtgaggcctcctcttaaagagaagcccttccccttctgtagctatgaaatgctactagttcctcaacaggggtgggactttgtcttctaccctatgctgagattttatctgacttactgtctcactgcatttatcaataaaggtagagagagtacttccaggtcagatccctttgctccttccttcagggatccaggggatgcaagagagcttggcagatggccttcacttgtttacctatctacaaatgcattgaaatcattctttactcttcgacagtttcattcatgcatataatgaatcttagttatttttaccctccattaccttcttccacacccactccttctgttgagactcttcatctttccagattttcctacttgcatgtcttttttgttatgtgactcactgagtttacttaggattgcttgatgtgtgtggtcagaaggtatctactgaagcgtatgccattcggcagtggttacagtgccgaggaaagtgatagcccttccccaggccaccaaagcaatgatgccttagggaatggcgaggcttcatagactcttcctgttccatgataaaatgttgaaaggtccagtcttgcacaggtcttgtgcatgtatcttcactgagctcacgtgcacaatggctatgccacgctcagaagatgtccttttcaacacacctcttgtggcttgtccatgcttcctgcctcctcgtctgtgacattccccaggctttgcagggcgtggtataggtgacttatttaaggctgagcactccattatcccctgttcttagcactttgataagttacgagtctctgcattaacatgtttgaataagaaggttctctactgaagagagtattactgatgcattaatgtgtaaataccgcagtatttactaggcagtttgagaacatcttcattcagcaaaacagtaatagttgtcagttccatgctagggtctatgatctccccagccacgaacacttgaccaggcttatagcaacacgaatgtggaatggtcctcggatacagtcacacaactgttggtcacccccataaccttaacgccattatcccaccaatgtgcctgcagaccttgctacatcagttgtcattgtaactcacagggttcatatctggacaaggcagctgatgatctttctctcctcgcagtcttcctagcacctgcttgcactgtgaaagctagtcagacaggaggaacctttcctttccttccattccacaatgagatttttccccatgtcctgtggctaacatttgtggtgtcttcagcaatagagtattacttactattaatttgtggtggggaactaacaatagtaacctatattgtcttgggggactctcaaactctctgaccaacagtgtttagggagatagcctacagctggcataggagtattcgtttaatacttacgacttcttggaggaacattgtctcagcatgcagggtacctccattcaaccttctttttctacgcttatcaacattaggcttccatatggctttttcatatagttctctcctaccccatgtcctgttctcccatgtgattccccgtaaccctttgcacccactactctcgcctccaccataacatcacttatatgatactgttactccttaaggtcttccttcctcccactccttccttttaaggaaccctgtctatcatctggtcttcacacgtactccaagttcatcatactattgcaataattcatagcttagatctggcacatgggtgagaaaaacatagcttttcttctgagcccaggttaccctactctggtactttccagttctgctcatcttctggacaattttataactttattttttcccagctgaatagcatcctattatgtatgaataccatattttctttatctgttcatcagtcccattttctgactattgtgaataatgcagtaataaataatgacatgtgaatatatctgtagtaggatatagagtcttctaagggtttatgttcaagagtggtagagatgggtcatgtggcagttctatttatagcttttcgaggagcctatatgttgatttccatattggccatatcaatctacacacctactaacagtgcataaggattctctcttccatactttgctgtttatgtggctagtattgaatttagagttaaaccaaaaatgcaagacaagattaggtcttagtggaactatatgcttgtagaaggagagactcaaaacaaatatatgagggctagagcaatggctcagtagttaagagcacaggctgctgttccagaggtcctgagttaaattcccagtaatcacatggtggctcacaaccatctataatgagatctggtgccctcttctggcctgcaggcacacatgcaggcagaacactgtatacataatcaatcaatcaatcaatcaatcaatcaatcttaaaaaacaccagatatctgaaaaatagcaatgtagctgtgcatagatatgattctgtgcagacaatgagcatagggtgcaatggagaatgacaagagaatgttttgaagctggggatggctgagctgaggtctcaagtatgagcacaaaccagctctgtaaatatcaggggcatgcactcttggtggagggaataaaaagtgcaaagccccgaacttcgaagacattggcaagtctgagagttcaaaggacgttccatgggacttggtgcacagagatggggaagaagtaggcaaggaagagtcaggatgttgcatattgccctgcatggaggccatgatggaatnnnnnnnnnnnnnnnnnnnnctcattgcctcttggcctctgagcaagatgtgctgtgtgatcatagccccttttcaatcttggagttggaaatcaacccctaggtatttccttggagatgcctgtgggtacgtaggatcaagcctggctggggagagatgtgagaactattgcaacatgtcagatattgctggactcatgtttgtcctcaaatggagaacctttgaacattaaagaggccaggctccatgtatggcctcttgggaagccccagtgggattttatagtgggcttctgagttaaaaacttctatttgttttgtaggacataccaattttattcgataatccctgatgtttagtgtccatccatgatctggctcatgcagaggtgtgtttctgaggctagagttttgttttcttttgtttttgttttccttgctcctgtgatgtctgcttcctatgcactacgcaatatatagcctcagaaagctgcatggggacccatcaggatgaggaaagacaccttcctccaacactagtggatcactggccacagccacccagtgtttttaccttcctccaacaccagtgaatcactggccacagccacccagagttttcaccttcctccaacaccagtggatcactggccacagccacccagcattttcattaagttgctctgtaggaaacctcatgtattacaggtttgcgtgtactacatagctgacacttggtcttgaacccttggttttcttgctttcatttgtaagtaagaggacttcatagtgtgtcaccaggtttggacaatttccctttttattatagcctcctccttagtaacagtttccatgaaatcagggattggatatagtggcggtgaatatttccttaattggaattaattaaaataaatatatagcaattaaagatgtctatttacataccactcaatgtcacccttcattcagcttgcagtgggtgataacatgatgtgaaaagaagctgaggctagtattaggagacactttccttttccataagttactccttgcttccctccctcattcagtgacacacattagttgccaagcctagggcaggccataggaatgctcacaggaacattcttggttctatgggagagagaaagacaccagaagttacaacgtgtgggggggtggctcaaacatccatttccagatgctccatgaaacccttcacatgtggctcctttgacattctgctacatnnnnnnnnnnnnnnnnnnnncatgaagactctggtgtaaccaatgtatttatctcttgttgatggacttataactttataggaacatgttaaaagtaaaaaggttgggcctgcttggaggaattaggtcattcagaacatgtccttgggggctgcatgaagccctggtcctttctttcattgtcttctctgcttcctagatgctgtgatatgaaacactccttgtatatacccttatcatcatgataggctagtttaacccctcccaccatgagatgacaacttttttttaatatactttttattaggtattttcctcatttacatttccaatgctaccccaaaaagtcccccataccctcccacccactcccctacccacccactcccactttttggccctggcgttcccctgtactggggcatataaagtttgcaagcccaatgggcctctcttcccagtgatggccgactaggccatcttttgatacatatgcagctagagtcaagagcttcggggtactggttagttcataatgttgttctacctatagggttgcagatccctttagctccttgggtactttctctagctcctccattgggggccctgtgatccatccaatagctgactgtgagcatcctttaatctcagaaaagaaatgattcctcttttaggatcgtctagtagctaccatgccaataagcctcaccatggctgtgtttccttatttgtctatgagtagagaagtccactgtgatcttcatgaggaacttccagctatctgtctttaccttgagcacctgtttccaaacaagttgtctgcattttgtggaagatgacagccattaccagtatctggtaagggtagggtaactttacagtagcttgtggtcctttaccagggatgctgttagacagtaccacaaatgaggtgatttctacagcagaaatttgatgtctgttatggaggctggaagtctaaagttgggttgttgcagccttgagtctttataagagccacaagggatagatgtctcagccttctgctggcatctagtattagcttcatcttttgaaaaatctttctgatctctgttttttcccagcattctttctctgtgtttctcgccctctgctttgtgaaagannnnnnnnnnnnnnnnnnnnctgaaaaatagcaatgtagctgtgcatagatatgattctgtgcagacaatgaagcatagggtgcaatggagaatgacaagagaatgttttgaagctggggatggctgagctgaggtctcaagtatgagcacaaaccagctctgtaaatatcaggggcatgcactcttggtggagggaataaaaagtgcaaagccccgaacttcgaaagacattggcaagtctgagagttcaaaggacgttccatgggacttggtgcacagagatggggaagaagtaggcaaggaagagtcaggatgttgcacattgccctgcatggaggccatgatggaatcagggagagtcagaaaatatcaggattaaccttgactcatcccctaacatgtgatcagtagagatcttggagccctattctcctgcttatataatgtgtgcagctgtggctgcccaggtgcctgtccttgtgctctctcaacctcctgtacttgattgtatgatatgtgcacacatctccttcctggttctgaatgcccagtggagcacattgtaaatatttagcaattctcttcttggccactccagggcctgacttcaggaggtacccagggcatgtgggtggggtaaagactcaaacatcaggactccaaattcagggatgagcagcctggccactgcctggcactctggcgagcatccttgggaactgcacttctggtttagtgtggtaaatgcaaaagcacaccaatggaggctcagtcaggaagttgtctgtgctggagccgactcaggtggacagctgtacaccaggtgcttgtcacaggaggtcactggcggtgctgcccaaggtgactggcttcctgaagctaatggtggcagatttatcatcttcttcccaggggcgaagataatgacataacttatattccctgtgatttagtgacagctccttcatttctcagaatagccaggagactggatatggatggaggatggccttttactatcacttgaaaaagcaatataagttgtagctgtcctcatcatctggggcaatgtctgctttagaaggaagatttaaggaacacattcttgataggaaggcccttactcatgaagaaaagagtaaataggcagaacttgagggcctactgtgcctcagcactgtgcaaactgctactaagactcagcactgaacaaaccaactactgtgttcagcactatgcaacacacctactatgtctcagcactgttcaaaccacttacttttactctgcttcaaccctgtactgatgcctctgcactgtgcaaattgctactgaaatgtagcactgtacaaaccccctgctgttctctgcactatgccaaacacctactgtgtcacagcattgtacaaaccaccattatgcttcggcaatgtgcaaatgtctcctgagcctcagacctgtgcaaaacactgactatgcctcattactgtgcaaatagtctactgtggcccaacactgcaaaaccctctgtgccctacctggtcgtgtcctcacggaagtatgcattatgccactaatggggcagtgtaaacacactcagggacagttctttctgctatctctcactctccatgatagcccccctgtgctgctctcagagagcgcttctcccagcaagagatagtttagaaatgactgcatgaaaatatagtgttcaaaggaagaagaaaatcccgtttccaatttccagttcagctggcagctgggctaggtgacatttgaatccacttatatttgccctttcgctcagttacttcacgaatgttgctgagtgcctactatgtatttggcttggtgctaggcgtggtgtcaagacaccaacatggcatctcttatttgctgcattcttggtctagaggggcagagaggcaggcaagtcttcccagtgcccctcactaatgcaataatctgtccttcagatggggaccattggcactgggtttagtagagaaagaagtaataatatactcgggcatagagccctggctagggacgtactgtatggtagggagtcaggagggagacagaggtgggaagatgtcactggtgagccaggtagggcctgggtggcaagtcggtccctttgcattatgcacagttgcaatattccatcctgtaggcaatgacaccagaggaggtgctgaatgggccagaggccacactggatgagtttccttggcagagaaacactaacaatgggttagagtctggggactggttagaagctgtcgtggccatgcagatgagatggtgtgaggaagcatgcttgtctagggagccttgagcctggctgagtccaccccctgactcctccatgcctgcagctatacctggtacttgaaaatggctggaggaaaatgagcccgggtgtagcttggttgacctctgggttcatcccccactccctgcccgatcattgtaatttgccctcagtgccgcctgatatattctcctgggcacttggtgccatgtgttccctctactgagatctccataatgtacctctacttaatgtttcctgatcttctgttaaatttgctttacgagtaagtaggctttgcttttagagcagttttgtgtttgtagaaagtatggagaggtccatgtgtccctctcccttttcttgtttctcctgttattaatatctcacatcactgagataagcttggtggcctgtactgatgagctgttagtcaccgtgcgtatagtttacatgaggattctatcttgtgtgtccattctctgggcatggatacatctctatcagcatgtgtctcccattacagcctccaccagagtgctctgcagttttccgttcatctctctacttctccacaccctgggcagctacggttttagattgtctgcatggtttttcattttttagattgccatgtatcagtagtcatatggtttatggccttgttagcttgactttctttgcttggcaaaagcatatcatagcactctgtgccatttcatggcttgattgtccatttcttcttagtaccgaataatattccattgtctgaatgtaccacagtttttctgttcacctagtgaaggacatttggccagcttccaagttttggtgtctttgaatgaagctgctatagacataaatacctggcttttaaaatgtaacgagagaactggaacaagaaggacagcagattcctgtctctgttgtcacactcactggcttctatcactagtaggcactagtctctcttctgccccagttttctgcatgaaggcctttgtgctgtctcctaaggatgttggaagccagtccctgtctcatactgcaggaggaaacttcagtagggatgaacatgcttcagcacctcatatctttctataagtctttattgacatgttctaattctctgactcgcttgctctcgattcagcccatgttttgactcccatttttggcctttcctttaagcaaaactctgaaatggttatctggaattcatgctttcattccctccgtggtcagtattatagttagcttgacaaaagacaccatcatctcaaggacgattctcttgcatgtctgtgggagattgtccaattgatgtgggaagacttgcatacttcatggtagtgccagttcccaggcagctgatcctacagattatagttatcgagacattgagttgaacactagcatacgtgcatttattgctctctgcttcttgattacagatataatgtaacatctgtctcaagctgtggccactatgacttattacagtgatagacctgacatgtgagacacagtaaactcattctctcctgagttgctcttgtcaaagtattttatacagtagcaggtaaaacaaacaaacaaacaaacaaacaaacaaacaaacacagaaccaaaaccaaacgaaagaaacaaacaaaaaaccccaaacaaaaaccaaaggtaccctctcttcttattccctcactgaacatttctggagcagatgttggcaatgcctgggcctcacattcacctctgtcaatgcctggactgcctgcattcatgtccccaagccccagttctgcctgatccagcaggctcgagtgtgggaagactagcacaactgggagtagcctccactcaaagatggattgggggcgggatatggatgacccatccctgttccacagctggccatgtgtcataactttcattttccagctgaaggaaactgcagtcgccgctgtgtgtttcctaatgtgtttcctaaagtatttcagagtgtgcttctgaagacctaaacttagacacctttcgtgcagaccatcctacggacaatcctgctggagctgctctgttaaggctgccagtcattctttctgcttcatttcttcagcctttgctgggttaggtcttctcacttggtctttgggaactgctccccttgagtttctccttgctctcctgctgctcctttcagatgcctttgctggctgcctctcattttccaggccaccatacccactggcagggagatcagccaggttccagaaaggaagggacacactcttcaagaagagtgggagttaattctccattacagtgaggtcaagggggaggtgacacatttgtcaagagcctgataagtggcaggtactcctatacctcttagctttagcagctccaacaggaaggtaggttttgaaaaacagttaagaggaagacataggctccgagtttctgaatgtcttggtcaaggccatctgtgtttggcaccaggaagtggcccctaggctgtcccattgtcttcactttatggagcttttgtttgagatactctgctatgaagaacaccctggcttcttctcctctcttgcttgatggatgtctcactccctctaggccagcaccccatgcccttaaatttgatttcagtcttgatgccctagagaaaaagaaggcaggacagagcccgagcaacttgcaggtggattttgccttcaggcctggagtgttgttgaacctctgttggaaatgaagaagctaacttgagaagtttcttcctagaactgtgctcaaaggtgatcagtcccagcaggccacctgcgaacataggatgcagtatttcaacaagaggtttcagtagtgtcttattctttgttgagtatggttgaggttggagatggggttgtcaaaaactttctgggtacattcccaccgactgtttcaagatctaaagcagaagttccaaatgccaagggggaatccctgcctgccatgagatcaagcaatcagctgctggctgatgcctgcttcatggtgggttgtgttctccgggataggtatattctagatgcttctctgtatctgttgagcttggggacagaactgaacttaatacatatctaggcacagggataggtccatggatgctggcaatcatgcttgcataagtgagaattgctttatggcttctctctctgccactaaacgttcacacagtgcctgtagtttgaattgtaaggccagggtgtccaactctttggggaaggcagagatggaaaatatcttcgtctctcttgaacccttatgttttctcctgtatctcatctagccttgaattgtgtctgaggcttggtcagtcgtgcaggagacagtgttgaagactgtgtttagtgcttcttcatcgatcctatgtataccctcctttagggattcagggaagacagaggacatggcatgggtatttgaagaacatgatggctttaaagggaaaaacggtgagccctgatttaaagaacagagagaatggggaggtagttggattatagatcagggagcagtgtgtatagaagctgctgcaggtattagggatttatgctgcccatgtctgtgctcaggtagtcagctgctgattttctacaggaggacatttccagtttacaaattttacactttgcggtctttgcaatggagaagcaggttgtgtgtttttagtgtgagagcagaaggaggcaaaagactcaggcaagagcagatcgatggtggtgtccattgaagctgtcccagagctttgttaagcacatccttggagttctcattgcctcttggcctctgagaaagatgtgctgtgtgatcatagccccttttcaatcttggagttggaaatcaacccctaggtatttccttggagatgcctgtgggtacgtaggatcaagcctggctggggagagatgtgagaactattgcaacatgtcaaatattgctggactcatgtttgtcctcaaatggagaacctttgaacattaaagaggccaggctccatatatggcctcttgggaagccccagtgggattttatagtgggcttctgagttaaaaacttctatttgttttgtaggacataccaattttattcggtaatccctgatgtctagtgtccatccatgatctggctcatgcagaggtgtgtttctgaggctagagttttgttttcttttgtttttgttttccttgctcctgtgatgtctgcttcctatgcactacgcaatatatattctcagaaagccgcatggggacccatcaggatgaggaaagacaccttcctccaacactagtgaatcactggccacagccacccagcattttcattaagttgctctgtaggaaagctcatgtattacaggtttgcatgtactacatagctgatacttggtcttgaacccttggttttcttgctttcatttgtaagtaaggggacttcatagtgtgtcaccaggcttggacaatttccgtttttattatagcctcctccttagtaacagtttccatgaaatcagggattggatatagtggcggtgaatatttccttaattggaattaattaaaataaatatatagcaattaaagatgtctatttacataccactcaatgtcacccttcattcagcttgcagtgggtgataacatgatgtgaaaagaagctgaggctagtattaggagacactttccttttccataagttactccttgcttccctccctcattcagtgacacacattagttgccaagcctagggcagggcataggaatgctcacaggaacattcttggttctatgggagagagaaagacaccagaagttacaacgtgtgggggggtggctcaaacatccatttccagatgctccatgaaacccttcacatgtggctcctttgacattctgctacatcactgccatgatggtgcatcttgattgtcagcttgctagggttgagatagacctacgtaataattagaaagtcatacctctgagtatgtctgtgagggtgtccccagcgtcactaagatcatgaagactctggtgtaaccaatgtatttatctcttgttgatggacttataactttataggaacatgttaaaagtaaaaaggttgggcctgcttggaggaattaggtcattcagaacatgtccttgggggctgcatgaagccctggtcctttctttcattgtcttctcggcttcctagatgctgtgatgtgaaacactctttgtatatacccttatcaccatggtaggctagtttaacccctcccaccatgagatgacaactttttttttatatactttttattaggtattttcctcatttacatttccaatgctatcccaaaaagtcccccataccctcccacccactcccactttttggtcctggcgttcccctgtactggggcatataaagtttgcaagcccaatgggcctctctttccagtgatggccgactaggccatcttttgatacatatgcagctagagtcaagagctccggggtactggttagttcttaatgttctacctatagggttgcagatccctttagctccttgggtactttctctagctcctccattgggggccttgtgatccatccaatagctgactgtgagcatcctttaatctcagaaaagaaatgattcctcttttaggatcgtctagtagctaccatgctagcaagcctcaccagggctgtgtttccttatttgtctatgagtagagaagtccactgtgatcttcacgaggaacttccagctatctgtctttactttgagtacctgtttccaaacaagttgtctgcattttgtggaagatgacagccattaccagtatctggtaagggtagggtaactttacagtagcttgtggtcctttaccagggatgctgttagacagtaccacaaatgaggtgatttctacagcagaaatttgatgtctgttatggaggctggaagtctaaagttgggttgttgcagccttgagtctttataagagccacaagggatagatgtctcagccttctgctggcatctagtattagcttcatcttttgaaaaatctttctgatctctgttttttcccagcattctttctctgtgtttctcgccctctgctttgtgaaagacactaccaaatggaaacaagttccaccttaatgtttttaaggtgtcttctttttaaaaatttatttttttctcctatagtacatcccgactgtagcctcctctttcaccactctttccagtccttctccacctctctgctctcccagatccactgctcctccattttccttcagaaaagagcagacctcccagggatatcaagcagacatgacataacaagttacaatacaactaggcacaaacctcatttcaagcaagactagatgaggcaacctactaggaggaaaagggtcctcagagcaagcaaaggagtcagagaaaaatccactcttactgttaggagtggcatcaaaatttcaagctaggcaaccataataagtaagcagaggacctggcacagacctatgagtctctgtgattgctgcttcagtctttctgagaccctatgagccctgcctagttgattctttgagccatgttctcctggtggatgacatcattttaactcaatcatttatgttatgtttctatatccattcatcaagaaaatgaaatcagagataccatatgatctaactataccattcccatgggtaactatgagagaatctaagttagcactccacagagagacccacactccacatatgtatttactgcagcaccttttacattgctctaggcatggagtagtctgatattcatttcacaaatgaatggatgaagaagatgtagtgcagatatgcaatggatggttacttgcccaaaagatcaacaaaattatggcgtctctggaaaactgggtgggactgaagatcatcacattatgcgatctgacctagcttctccacaagcaaatctcttatgctctttctcatttgagggaagaagggagattatttgggaagaagaaggagtctgggaggaggctgaggatggggatgaaaaggtgtaacagggagaatggttcaagtttatgacatatttgtaggaaaatgtcataatgaaattcatcattctcaacaacagacggatgctaataaaatttaaacagtggagaagagtgaaaaaaggaaaagactttgtgttcaataagattctatcatctaaggtagcaggggtcggccctccagcatatgaattcttgggagtgttcctggcacagcacagtctgtgccaaattgcaattgctgctgttgggtctgagtgtctgggtggagtgggggacccaataaaagacttttgtggtgaccacagtagatgaactgagccagtgtcttccagtatagatgccacatagaggctagtgctcacatgttcattatgcattctgacattgatcccatgtgctctgcaatgttagctgttcacccatgcaatccctcattcccacagtgattcattcacacacttacacactgtattcacccatgtactcactcaaccacgtattaatattcacttccccttccctccagcagtcacatatcctccctttctttcatccactcaaaggcaggcagagccccatcctcctagtctcttcgagtggagatcagatttgaatacccctcacctccctttgctctctgtgctcttttgagcacaaaaagctttcgactttttcacaatgaaactgtgatgacttgtacatttctctgaagtggtgtgattctctgggaccgaagggaaaataatggtttggcaaggaatggatgtacaggcaggctgggcccttgaattcttggccacttgtgcccagaagaagaataggcaggtcctctgcattcctctttgttgtagggatgagagggtggagctggtgcacttgtctggtccagagcctatgtgctgctgacctgattgtccatacctgcccttgagcaaaaggctctcatgatatcagcctggtggacagtctatgttcttttgtccaggtcctgagtgatactgtttctcggtgctgggctcagttcaagatggcctttgagtagtgccatattgtgacctggagctcagtgaaggcctgagtgtcctcactgtgccagagcagggtagggatcagcctccattatcctcctagactgttccagaagaggcaataagagatcacctctgtttgccacatccctaagacacctactaggcaaggctctgtggctggggcggacatccagaggcagaacactggggaagaaggcattgtctcctgtgcgatggccatttgtgcaggatgcagtgtctcactccttcctcagctgtgtgcagctgagaggcagcatggttctctgtgctgcatggagctaaatttgagtgcagaatcaattggttccatcagtctgtttatttgcttgaggtctgcattttgataattattttagcaagaatttattttacttattaaaatatttgggggcattaatgttaccttctaactcccctcaacaatcaaaggtttctttttcgattacctagaagttatgaactagaaatgagatgaaagttgttgttctctagtccttattctgaagactcacaaagccaccacctgaataaaagttactggaaagttttaacattttctcttgctgtttgcaaagtgtgactttggtttatatagatgatacaacagagtctagaagctttgaattttccctctgtcctgcctagctgctggtatgtattttccctagactgcagttgtgtgtaaagcagagacacgtgcgttatgtgttttcatatcttagcaaagggcagtgtctccctggagtagactgatgtctgagaccatgacctaatttggaatgatgatgacagcagtgccacacacatatacaacaaagggagaccagttctctgccactgtctttcaggtatgggagcataggttgacattgggctggcttgtgtctgtgacttagtttgaagacttattcaatttatgcttgtcatcctaagccatatatttgatattacttctgacattttcttttacatttttttgttttcttgttgtttctttttgctttacattttatataattttggattctacatgtcattatattccttcctaatctggaacagaattgtgttattttatgtgcagtgttgtctttaatgacctgcactacttaaaacatatttgtatttctccaaacatacctatatttctttactcaacagaataaaaacaaattgacagagtagctattgactcctttgactaaaatgaggaaaaacttgttattgtctaagggaaaacacctagtgacctgacaaatggagctgcagtgcctccccatgagtctgcctttagctccgtaggtattacaaatcctccatgattctccacacatctgttccgtggtcagtgataaatcttagtttaccattctcatctttgtccaagtcatcatagatttccgtagagggaaggtggttgaggtatggatcatggctagacagtgtcataaacttaaatgtctaaaatataaaactcactttgccattttctgcatgagccctctcacggtgtccccatctgccctgagataattcttgtctcttccagttctttggaacgcagcctgtactttctccatcactcccccttcccttgtgccttctcccatctacatcacatctgcatcaacagctgcatcacatcacatttatggccacatcagatgatccaggctcctaccctcattcatccttttgttcctggcttcctgtaggtgtctccattttctggtcactttctaccttaccattcttttcttttcctcagcatcccctcaggtgctgagctgtcctctaggcattcatctctgaccatctctttcataatctatctggctccctgattggcagtctgggctttccactccaggaccagatttcatcttaaattttggtctctcccaggatccatgagcttctctgggatagtcaccatggctccccggtcctccggttgtaggtcttgtgctcactagtacgtgctctggaaatgtccgttttaccgtgtaacaagaaagcatcaatctttctttagtcaaaccgaggcttatgggtttagtacaaaaaggcttgggatggaatgaggaaattgcttggatttaaagacaagggctgcgcttactgatcatgtatttgaatgagcagctcttgggcatcttgtgctctgttgcagtagaaaactagtatcctctgagaggatagagtgcatccagactcatggtggaaaccgaagctcagagcaggtaaggttgtggctgagctcctgtagcactgttggcagagctcggtcagatccatgtgccaccagctgtatcgcttggacttagggtgttcatggaacacagacatccacactaggaatctccccattcttctagggggttgagattggttctctactagtcctgcaaagtctctttatacaggttgggtgtatctagccagccctcagtgtagtagtgtatgtgtctgtgtttctctctctgtgtgtgtgttctttatttgagttgaattctcagccattttcttgcaatttttcaatcattcaaaaatgctttaatatgttcgcacaagctaaatgaagccagaagttcaccttaaacttccagttgaactcccagaaggtacctcaaggttttgtatttactggccttatgccagcttgagggtagagtaatgtctagaaatggatcccagggatacatatagcagcaggctttagggaaggcccccagatgatgagactctttgcagtcaactgacctttcagctggttcctctgcattagctgctgaggtctcctggggtcaggacaagactgaaggattcttacgagtctgtgtgaataagggttgaggtcccaggccaacatgtgagatgattatcttaatgtaagcacttacaccctttaggaaatggtctcctttgcaaaagatttggtttttgcaggagactcttcagtacatggcatagcccacactgcctctctccactcttggtattgtacttgctctggtttctgatgctggtacatgctctgtcaacatctagggccttttttccagccccatgcctgcctgtcacttctctgtttagcgtagtttgcacataacttctgaaaatgtttctgaaccagagacaaatgaaggaagtaagctgggtatgtaggaagaataaataccaacactggctcacagttgcctctccagtctgcatgccttctgggaggtgatgctacagctgactccgcagctgcagctctttccgtggacacctgtctttcttctacaagcttagtgctttccataggcaccatatcaaaacccacagtggccggggcttccttgtgtcaccgtgatcaggatcaggtggccagatccctctcatctgcctgctactcagttgggctttttggatcctatgcaccatgaatgaccttttgtctccacaaggcctctgtagaggcagaaagggacactctgacttgtgggaaatgaagatgctgcttagatgtccttgcccagtcacttcaactatttttaccatgggaagatgttcagcacagtctttctgtcttaaacgcgtttcggcaccaactcttacacacgcccaactggccaggaagaacacagcaaaccggaatcttctgcggcaaagctttattgcttacattttcaggagccagagagcaagagagcaagagagcaagagagagaaaaggaacaagaacaagaaagcaagagcaagagagagaaaaagcaagaacaagagagagagaaagcatggcaaaaccccgtcccttttaaggagaattatcctccgcctaggatgtattactccctgattggctgcagcccatcggcccagttgtcatcacgagaaaggcagaacacatggcgggaaaactgcccctgcacgtgtgcagattatgtttaccacttagaacacagctgtcagcgccatcttataatggcaaatgtgagggcggctcccaacatttctgaggaagtttctcgactgatcactgtgccaaggatggaggtattcctgactgcatctctgttgctcacagcagccatgcccttcccagctccctcaaacctcaggcctgcttatacttttgcttacccgtcatgctgccctgcgcagtctgtggtgggagggtaggtgttctgtggacctgtctcagatgagtagattcttgctcctgagtgcagctctcattagggatgtaagcacccatccttcatgtttctgtccctgtcttccacggccctgccttctccagctgtctgcatactttgctcctccttgtggcatcttcaggaaatcgtcaaggcacatcaagctggggaaaggactgaagagcagattgacatttctgatggtagccctgggagacagtgctgagtcctggggaagggaacagtaggtagagtagtttagtgagtgtggggggaagggaactcctcccactcccaaccctgctcacagcctctgcctttcagctacagggcaccagacagtaagtactgctttcccagcaatggtggcgcacttgtctgttgcttcatttaggccggggttagggcatctcccttcttcagaatggcaatgtcctcaggtgaccctgtcagagcatgctgcctccccaagatgttcatcaagttgttcattttaattaagtgagaggacatgtgacagtatcagcagccactgcccctgcctggcaggacatcttcacctttattgaagctgctagcttgctaaggcaggggcccgatgtgggaatatttgcctcaatctgttgaccaatgaaatacacatttgaaattaaaatattgggtgtgctttataattggaaatcagagtggtatcaagtggtccactccttgctgagtaatatgcacagggtaccctcccccatcctccctgggagccccaggaaagcacagaatagctatttgagtgtgaagggagctgaccaggcttcctgctggcctgctagctttcagcctcaggtctgtggcttattaaatgccattctttctttgtctgacctcacatcgtcctgataagcatgaggaaggatgggttgcagtgtgctgtgggaccatatttgctgtgacttcactgtcagccagacctggatagaatcatacttttgctgttgagggactgtgtgaccatggacaagtcattttcttcccagagcttcagtttccttatttgtgaatggtgacatttttctatccctcacacaggggcttgcctagggaagtttctagattgggtagtggggcatttgtaagatagaacctgaaatataatggtgtgcaaaagtgctttctatcataccctctcctttgtccttgtaagttttgtcctttagatgcagagtctggcagatcctggcagagcctgggggtgtcctggaagaagctcaagtgagaccatgatgatgtgaggcctatagctggtgctcagctgagctctggctttgcctagtccaagtgtgaaatctgggctaggaatggtagtgagttaatttggggcaaagggttaagctttgtgtcccaggacaaatactcttataaactgagtgccatcttcagagaagagcataagctccttgcacttctgggtgagataagacctcaatggaggctctggaacccacgccaggatagctgagtgatagacaccctcgctggggacatctagtacctgatattcccccttgtctattttgaaacatcttatcccccagagtctttatatcagctataaagatatgtatgataacatttgaagtaaacccgatatttacagattatctggggatgggagggaggtgttggtagtctttggcccttgtcggtaaggtctgcagagtgtttcatgttcacattgtcctttggtgcaaagatgcagcttgtcgtcccggcttagtctggcctgtgtgcaccttgagggtgctggggatgcatttactccattgccatcctgggaatacttccaacgtgagaagttccccaagtttaattggccggcctcctgcctgtgtggaaggagcacagctctgtgctgccagagccagctctaatcagcatttgctaaggtttattaacaccttatcagtgcttgggatggctcagtgtacacttcctcgtcggtggcattatctcaccccaggaaagctgcaaacattaggcagtgcagccatccagcatgcctcattagctgttcaaagcgcgtgtgctttgagggcggtggtgggggagtccatcggctccctgtggtactaaaggagggttgattgatagtgggatctaacctggaggactttcagctccaagatcatcagggcaggagtgacagtggcccacaggacaccctcggtgacacttgagccctcactggagggctgtgctgtgtggtttagggacttcttcatctgagccactccacagcttccctatggcatatttcccataggaagaaaaggtagcttgatgataggaaagagcacacagaacttcccaagcaggcaaacttagacttgactgtagccctgtcatcacagggcgtgtggacttggacacatttctgtattctccctggaaaatgggggaaattcccaacagataagaacaatcctttggcacatagtctattgtgatatttcagacgtatttgagcagctgaactactgccactgcctttcgctcctcagttttgtcttgagactgctggaggagagccaactctcttgatgggagccacctgtagtagaacctccctgatttctctccaggaaggggccgaagggatgggcttgttgaagaacaacttctcttcagaatcttacatttcagtcaatttggcctcctgctgtgtgtgggcaacagcactatcttaatacagctctcccttctctctaatctgtcttttcagcatgctctgtcaattagaaaatgcttgtcagctgagtgactattcaggaaaacaacctacatgacttctctagcacttgaagaatttaaaataatggcaagggattaacattcgagagaaggcattgttaggaaggagggctgctgttcagagctgcctcccagcctgtacgattaataacacctttcattctatagccccatacatctagatagatcttgagcgattagcagatgctgtgagtagaaattacttcatcttctgcagaagtgcgtctacttctggagctgctagcatttgattctccactgagggctagggctgctttgtggttactcttctctaacttgggggagcacagatcatcactaaggacgttagtactttgacagaagcccttgatctctgatgggctagctctctgctaggcactggggagggtggaataagaaatagctctgctcagaaggatcttatcagataggaagacagtctagagggcacccagcagaagggcagcttgagcttcttcgaagtgagcttcgctgggactgaagttgagggtagatgggaagaaccccagctcagggcacaggctgtccagaatactttggagagattgctgtaacatttagtaggtctgggaccaggtataggagttctcacttctaacccattttcaggtgcttttgctgtgccagggagtacacgctaagtcagaagctttaaggcaaaggtagcaatcacagaaagatctctagcggcctgtggggaaggctagatgctgacgttggtgcccatgacccactgggaaacacacatcaatgagaagagaacagctgctcctcaggcatagcccgtgattgccacatggggatgtgggatgagtgttactagatcttctgcttggtctggaaggattggaaatctaaaattttaaatataaaatgtccttattttcacaatgccacatggggctgagaaatacatctgtgagcttcatatggctagtgggtgaatttttagtgtgtgacctttctttgaaagaatgagtagaaatccgccaggtggcctgggtgagaatggactttttgtgcaaaggggagtgtgactgtaaatgtgtggaggcacaaaatagcctgactgtggaaacgggagccttttgattggcagaggcatctgggatccaagagagaaaaacaggagctaaaaggacattgaggggaggcagtagaggaccctcaggagtttggggggatgtcaggtttaatttatgactccagcatgactggacctcagctcctctgttggtagtgcaggaagaatagaagcagttcaatgctcatctagcaggctgagcctaggcacagtgggccaggagtcacttgctgatccccctcacctttggagggttgcatttcatctaggccgactttcttgaagaagtcttgtgggttcatgatgatacttctcagggagggatctttgtcctgcatagtcaggagaggagatgggagtcttttcattcatcaccaacttgatactgagaatcatatttgtcttgagaaagtctttgggtcaaagtgagcaggctggggattaatatgaacactgagaaagttgctgactttccaaaactccattctcagttatactttcatgaatattgatgaggttattattatttaattaatttttaagttaacaaactaatggatttaatcatggcatcttcatatatatgtatatggaataatttttattattaatatgcaaatggcttgttttcaaaacttgttagaagactgcatatcatcatgacagataaaatatccatatgtgtagtcatagtgtaaaaatggagtttggatgtgcatgcatgatactgagggttcattccctaacactgccaacaaaacaaaacaaacaaaagcacccctaaacaaagcgagctatctccttgtgctttgaattaagtccaatgaacatttgacatcctctagattaaagattgaaaacttaattttttttaaaagatcaaattctacatgtggtttgccgtacatacaatttctgtcactgttactgaacgctgtagtagctacgtgcagttagtaaataacaaactgtggatatagactaacaaaactccattcgtaaaacaagctctgtagcttcagtttgctgacctgcatcttatccttcttgcaaattttatgtatatatgtggaactatttatagtttttctataatttgattttttacactacaatacatcatcaaagactttcctataaacatatgttcatttatatttttatttctaagggctgcaaagtattccttataatagcaggttggtgaagtacaatatggcaccgttcatcctttatttaggcagtcttgtgatgttggatgcttttcaagatcattcctattaaaacataacttgaggataagatgtgtgttaaaccatcttatactgacctgttcaaatgatctgtgtagactctgagcactgtaggtattcaggtggccgctccattctctgggtctcttttagatgcctatgtgagttttctgttacttccccttcccattgtacagctcagagccaaacagttcatactttgcagtaaatagtgggtgtttctttaagatttgttagtgtctggacttggtggcacacgcttttagtcccagcacttgggaggcagagacaggagaatcaatgtgagcttgaggccagcctagtctacaaagtgagttcaaggacatctgtggctacagagaaacgtgcctcactggctgtagcacttgaaagaccaagtcctgcccctcacctgggcaacactgtggagctggtcctgatgtgaagtcacaagtgagccagctaccggagagtgagagcaggagagctggctcagctcttcataagctgtagcacttgggagaatgggccctgaaccttgactgggtggcacagtggagctttctctggaggcataggtgcaggtgagccccccacctgagggcatgcgagcaggagagctaactctgcctcctacctatggaagcattgggtggcctagctgaaacagtgctggataaaggagagctggagggcagctcagctaccaccagggcccagatccaggcctctgaattagcccaacccaatatctatatcctcatatatgaatggttgggatatgtgaaagagccagtcctgctgttccagagcttcagggtctccatgacagagggcaacaacaggttaaccaggaggagtcctgatgaggatccaatattgatggtatcacagaagccagagctcttgaaccagacctgtgtggacagagagatatactgtgggacacattgtgacatactacagcttccacgatgagatgtttctatgctttgtttttagtgtatgtgtgtgtgtgttatttttgcaagggtgaaggtggttatatgaggggttgggagggtgagcggaactggggttcatgatgtgaaactcataatgaatcaaaaaaaaaaaaaagagctgttagtccactgcttatgtggagtcagtgtctctgtctgcacaagggagccaatttcagtcttcacatcctccttgttttggggtcagttctagggcagctacctcagtggttgtcctgtccaccacatgctgatatataggcaggcgatagcgctctcctcaacagtgcatgccgtgggcttcatctggacagaggtggaggactgtagcctttcttcttttcctgggctagggtagggatagcctcttgtgccaaaccttacaccatccagcctcacgggttctgggcagaagcactggctttccacctgcagaatttcaaggggcacagggggtcagacagtggttatgtaatactgtttgttcctagggagaaccgagaaagaaatctgtgggagctaaagtcgagggctctgatgtgcctagttacagccatagagccccaaaccggagtctgcagcttcacacccaggggcaggacacagggtttacatggatctggaagccatgggctctagttttaagggactcatagtcacaaaggggaggtgaagcatatagctgttggtgtaaactgagctggataactgtggtgtggtgtggttgactagtccttacggtgggccagtcctcatggcagtccgtcttctatgtgctttgcatgcaaatgaaggctagctcttcattacaactctcttgcagcagactttgaatgagggatggttcagatttcaggagaaattccagagtgacccctgacccctagacatttctcaagggtcagttagaccctggaatacctttgatgcaaagaaatatataccattagactcacagtctttatcttagggaggggtgtttgtgtgtgcttataggtgagaccacggaaacatgtttgtctcatgtgatttgttccaagtgactgggaagtgtgcaaaaacagcagagttcttgctaggctaagggtgctatgacatcatctcacaggacctgtgggggtccttggaggactgtgatattggcagctggaagcaggagattggagggatcgagtcacatggcatgactgccattttggaggctgatgttaaacatgaggtggttccttttagacaggaaagtaattcctggacagagctctggggagaggagagaagaagagcacatgtaaaaagggtaaccgcatggcctggcagaggcgagttgggagttggtgtttaaaattttcttgggcttctacttagtttggatggtttgagctctttagttaaagaggctggcactacagatatgggatgatcaatgttgctatgggaacacatatttaggaagtagagggggaagaaggaagggagtaaggttatcaggaagggctgatgctatgtgtgtcagagcagattgtggaggccaccagaagggggatgcatgtagcagggagatgcgagagccttgtggagtggcagttaatccgccctgcacctctgtgaggcgagcaccccagagttcactaaccttctggttcctaaggtgagagctcagagaactcctggctctgtttggaggtagctgcttagagagccttgacatttggaaaagaagtagctgccaggggtcagggtacctgctagtccacagaagcagtggcctgtagcctagggcggtgggagcctcaaacctgggccagccctgggtcttcttcaacactgagtgtaatgtagcctggagttctgctcatcatgagcttggcgatattgtgtatgtgctcaaggagtggctattcactgaggccaggctgtgctgtggttatgggtaggttccacatctggggatacctacatggtttaatgtcacaggctttagtgtgaggcagatggggctctgttctgggagtaccattcatgcacgtcctgttgagttgcttagactccaggtctctgtggaccagattcctcattaacacgatggttaaatgctattcaaacttaggcagctttatcagattgtctggttggtggggcgagatttgcctgatgggtagacctgggtaagttttccacttaattacacaacttatttccatgaattgtagaatacagagcagctcttaatagaaagtgcatgttgcaatttctccagtgggaagatcccatagagaggtaggagtcaccttggagttgaacatatagactcatacagaagtatataaaggagccagatgcccactgtagcatctggtttattaatttagttgtgcatacacattaaaattcatatgttatataaaagagtatgttaatttagaaatactgcatcttcccccttctttcagtttatggaccagttttattcaaagccttgcctttgtcattaccagagttaccgtgggtaatgtctaacccggttttcttagggcccagaatctctatttccattgtggtagtttgagatccagcactccctggatctgtgtaaaactctgtccctagagagtttatccaatcaccattctcatttacataacattaggagacagtttttcatttattctgtaggtgtgtgtattcctgatctccacaatgtaactacttatagtattacatttccaagtgatttgtaaaacacttatttagagctacatccccagcctgtgagtctaaggtcaaatccaggaataattattaaatagaggttaaatatctttgcctcctcttttaatgattctatcagacaatctcatgaacatccaagagtagcattgattgaaggtgtttcaggctaatgtctttctacccaaatggcaccttgcttgttaaaataaagtaaatgagcgaactgaacatcaataagaaatagtttaccaggactttgaatataagctctcttattctttccttagagggtggttttgtaaagttactttccttcagcttggtcagggagaacagcaatggacccataggcagttgttgagttgaataaagaaataaacctaatgttttcctgggtgcttgtacctggcattgtgcccagcacatagtagatgccttttctggtacatgcgaggtattcatagtgggacaattttttccttttcctttgcttaagcagccatggttgcttcctttgttttccttgtctcaggcatctacttgcattcctgaatagacctacctttcattatctaccaggcacgtgctgttccttctaatgagaccattgcctctcttacctctccaccctccattactcttagataagtctctggcttccttctttaggaaggcacccctcttccttagatgagatcatacactctttacccaggttatgaactcatagggccaattatttctcgtccatattcttgacttgattgttgaatgaccccttagagcctccacagaattgactgtaggaaagacctcttaagccctaccttgttttttgatattttttgtttgtttaaggctgcccttttctctttgtcagcagaccaagattagctaccctctgtgaacatcctcaatactataaaaatctctataggatccttacaactttattggaggctttctgaggccaggacaataccttactcacccagtgttctcaggactctagagccacagccttctgcctggtgatgatgaacttcgtcttctgtacagtttctccccggcttaaaggctgagggtagtgttccagctctgaggaaagcagacagcatcttgggatgcttcgtgacatctcctttgaagctctgtcttcgcagagcagatgggccttgagccgtaggggctctttattgctgtgtggtttgaaagccctgggagacagctgccaggctcccatatgcatggcaacaaaccatctcagtgagctacagtctatagcaagaggcatcatgtggccctggataagtagctcaggtgacctaaggctccatttctacttggatacaagctgctactgccttcaccatgctggtgggctggaagagcctcctttccttggctgttcaatgggagccaggccctgccatctgtccatgttatgttagctatctaccctctcagcagcctgacttgtagagaaggctctgtggtgggggcatataggaataggggtttacaatcaggcttttggggttctagcttctggaacacaaaaatgggactcagatcattgggtttggatctaagatgaacatttctgaaagacaaatcttgattttactactcctgagaaggctgataagcccagggaagcagccaaatgattcttttcctacatgtataggagtttttgtctttctccaaggctttttctagaagaagggatcacagacactgactatagctgtgtttgtcaacccatgcattgtgattcctttggacctctgtatccaaaaatatttacattatgattcataatagtagcaaagtcacagttctgaggtatcaacaaaacaactttatggttgggagtcaccataacatgagcaactgtattaaaaggtcccaagggttaggaagtttgagaaccgctggaagtgctgacctaggtgaactcatttggatcacctggtattcagcaccaccattgatataaccagaagaaccattgctctatccccaaggttggggagggcacaggtgatgtcatgtaacagtgcagactctggctttacgctattacttgctggcagtgaggggggatcttgtcttagtttacttacgctgccaataaaagtctccatagtccaagagggtttaacatcaagaaggttaatttgttttctcagttttggaaactggaagttggattgcagagtatcaacaaggtgggtttctggtgaagaggctctttgtgaactcctgccttcttgatgtttgatccatgggagaaagagtgaggggtaaagaaaaaggagagaaggggttttagtgtggtaaacgtggcgaatcccatcaagaacaccctcccctcatgactcatcttatgctgattaccttcccaagtccctgtctctgagtaacgatgaaaactcactctgtagtgagagagcttctcttgattacaacctgagtttgaaaaatgacagggaacatagtatgtccaggtatttatcactgtgataagacagtgaggcaaactgtcctcaaacataatttacaccaataaccacaaaatagtttccatgagtctgccaactgacttttggttttccttatctggtctagttttctttggacttggggttccactcatgtctggggttgtataaagaattaactggattaggtgaccatgacaagggtgtcctctctgaatgtcatttccacgtgggcctcagactggctcaacccagttctcatggaagtgacaaattccagcagagtagctgagtgtgtgcagaggaccttgagatctaggtttggaattagtatacatatcatcacttctgccttattctgtcaagcagagaaactctcagaatctgcccaaccctagggaatgaaatttaggcttcctctcttaatggaaggagctattaaagttgatgtcagagagcatgggtgctggtggtagacgaaaagctgggctgttggtgtcttctttcctgcgacttcatacccttattgccaggcttaagtaagattgcttatgttattatagagcttggtaagtgggaaaatcatggtcagtgatagttgcaattatgccattattaggtcagtggcttttctgaaccagacacgggatcagccgtctaggagcctggggataagataagaaacacagctgatagctgacccgagcttttgcagatcacgctgctcctgttttcctactcataagtaaatctatgggcaagtggaggcccttgcttaagagaggacatggtcttggtgtctgctgagagttgtcagaccagtccacatattcatcgccaggtgcaaatcctctgataacagggggagggcttggctcttgtccctctctttgtttcttagggtacccatttgggtccctgcctgccaggtaccccagacctaaacctccattcttccagtctccttatcagttctgctgtgtcatacctttggttacccagtgacgttctcctatctgctctaggtaatgacctttcatgctcatttcctgtagtctaagaaagcagctgtagtggtaatgagcaccccgtgaggtcctcgagtctagactaggcctaaagacagggtgcagttgtctcatggatttctttgtggtccatgcactctttattaaagttagatcctagccaggaggtccgcttgtacaaaacagcaaagtagaggtactttggctgttactgggacatctttgtctttgtctaccactgccttcctgcctgcgtttatgtatgtgtgtgtgtgctcccatgcacatgtgtgtgtacttacaggggtaggagggcgtggaacagaacttctgcgcttctgactttagctcttccccatgcctcttgctctcagcattcttcgaggaaggtctcctggattccccatcgtggtttggaacttattaaagtagagaatttagacaagttgtccagtcaggcagctctcccagactccagtcaactaacctgagtctttgcttttccattttttctttgttataagccctacttattattacatgggcaatacatattcactagaaaaatgagaaagtgtgaatatgtaaaaagaataaaagttgttgacgacatccctcctagagatagctgcagtgaatatgttagtgtgtatctctacagctgagagcaaacatcttttgatatcattaaatattttacagcattaattagatgcctgcttggcattgcattatatggaaggccatggtttatttaattactcatttagttttgaacatttgtgttggggttcatctgtgccactcagtctttggatatatttgtaatgatttccttacaagagatttctagtacgaagggcattcattgcctattaaaatgctttgaattatggaatagatgtatatatgcacatgggagttttatataatttatataaatagttcaaacacattatgggaccgacttatagactttattccttcacagtctctgtcatctgccactgttctttgttttagctccaaagagtcttaccctcccatctacaactgtccttccttccatgttctctacagcctctacattccatggagttctatagttttctctaggttttgtaatctctagggtttgttacattgatatttatttttgtctttagcatattcatttaatttataatcatgagttaatatgttaaaaattagcaggctaaaatgtatagacagtctccaagcactaatctgttttgcatcttccaaagtattcattttggaatgcctagatttttttaaaaaataagtaaatgtatgttctttgaccttttaatgctaatgagggcatgctacacatcccactgacctaggtagctactactgtgataaaatcctataaccaaaatcaacgtggggtggaaagagtttgcttggcttacatgtctgatcatataatctgtcacggagggaagtcagggcaggaactccagcaagagcagaaatgggagccattgagcaaagctgctccatggcttgctttccatggcgtcctcagcctgcttttttatgtaacctaggatcacctgcccagaggtggcaccacccacagtaggctaggccctcccacatcaatcattaatcaagaaaatggctcacagacatgcacactacaatctggtggaggcaattcttcaactggggcccttcccaggtaggtgtaggtgtatgtgaagttattgaaaccaacagcatatctactcactctgcattttgccttttcactctgaaacatgcttacagatctctctagattagtgtgtgaagcatttgtccagccttttcatcagctacagattatttgattgcatagttgtgccataatcttttaaaccggctctctcatggcaacatttagattccatccagtattttgctttaaaaaaatgaggtgcagagaataaccttgcaattaggtcagttagcttgcagttttcaaagtatatccataggatgaatttctaaaaatggaattgcagagtagagggatttttgcattggtaactttgatagatgctgcaaaattcctttccaaaatggctgtgctagctttactccaacctactgtgtgtaaatgtgactgtttttccatagctttgtcaacagaatctattatccaacttaaggacttttgccaatcaaatgcatgaaaatagcagggaagcatagattcaatttgagtctgtcttctgagtgacacgaagcgccgttgcagatgatcaaggagttagttgtgtttcattttctgttggccgtatgttcctgcactctgcctgcttttctgttaatttcccagagatctgtgaagtagggatttttacctcttgatatttggtcgagttgaaaatattgaactcatttttttattattattttgcttgtcatgaaatatttgctatttatgtatagtgaaatcattgatcttgtcctttattatgtctgagctttggtcatagaaaacattaatttgtacaccgtttataatggtttacttttttcccccctgtaggtacttttacggtcccgttgaaaacctttaaacctaaaatttaagtttaggaccaggtttgaattctagtagtcacttcattcctcacgactgactggctgtaactccagttccagtggatctggtgtcctcttgtgcatatatgtggtacatatacctacacgcaagcaaaatacctgcccacgtaaaaggaaagtctaaacttggtttataatttacatcatatataattatttcattcttcattgaataagtcatcattgctgcaatgagttttacatcatttataatatgctaaaatttattttatcaaactgatattttaatttaaatatactgatttgccttagtctaactttatattttgactcatcatatggttagattttgtgtacccctctattctttttcatttcttccactgctttttctactctttgaactttaaaattattccatctaaggctccaaaccagcctatgggtattttattgggaatatataagttaatttagggaaagtaaaaaaatccttatgatattgagcattatacaagtaagtgagtgtgtttccatgtttcccccatcttcctttgttaaggtctttcttcatataggtttatgtatgtctaggctaggatatccctaggtatttagctttttgtgttttttaattgcctttttcttcctcttcatactaaacctttaaattagtcaagaattcttttgtatatgtaagtactggctcttccccttctctccatgtgtacatgtgtgttcagggccagagagtgacactgagggtcttcctgggcctatctgtcttgttgctgcagagaggttcctccacagactccttcagttaggtggattgggtagaaagctccagggattttcctgtctttctttctagtgctaggatcatagctatatcccagcatgtcatgttgttaacatgggtcctgagaatatgaactcctagctatgtgctatacagcaaacactttcctgactgagctatctccccagtctcttcatcttgattttgtaccacactcttactagacttgcaattcttttcttacaagaagcaaattgacatttcttcatttatttctgagtgtctttacacaaagtgagctatagacatgctcctcaacacgtagtaactcattaaatatccaatatttgaattgtatgaaataaattaaataccactcacacaacacatatcatcacacttttgagcatgttaaattcctagtaagttttgccagttgagaagttttgtgtctcattctaaaagcttaagtatctaaatatcggaacagacagacatttcttataaagtgtaactgctaagtatcctcctatgactacctataatgtattgacttaatagctcagtggtccctgtatgtgacttgctgtgtagtctcacgtggctgaagcttgtagaacacatctgggtttttgtgtgtgtacatagattctatcatttctccactggcagccaggcttgacagaggtggatcagccaatgatttgagagcacattctctcgaaggtgcttaacatacgcaaatacaatcctgttcatagtaaaaggcgagtgtctccttttaaaattaaggaacagacaaagtggtggtgctgttaagcacaggctggtgacagcttgtgagggcttaggtgatggttagcaaaagggcagagggtaagggctgggttgctgaagggaacaaaatgtttccagaaagcaattgtgtgtttcttagagatttgagcacgctagactcatggatggaatttggtcctagaggtaattgaaaataagcattgcaactattcctatcaataggtgtacacccttgggagatatgtgtcctttagagtcacagcagttctttctggttgggcccttgtacctagaaactgggtagattttcagtgcccgtgagacacgacctgtcttgtgtggaaactaggtatatctgtgcctggtttgctcactgctcagttccccaggatcacagcaagccatacttttcctgggcagtccagcatccctgcctctacttgttcttttcattcaggaaaggatgcatttacgaattggggtgggagaagcactgtagtactgggattcaatctaaaacctattgtgtggggtcaaatgttgggccaaatctaagagagcaaaatttgaaatctttcagtgtaatgtgttgagagacacctccacatttcaggggtttaatctaagtcctatggtaggagaggggagaggggagaggggagaggaggggagagggagagggagagagggaggcatcaggctaacttacccatgctcctgtgggccaggccaattgctcatacatatgtagcaccccctggtggcattgtgctcaggctctattatcaacacaaatttacttctcagtctgccaattaccagcttgtggctttgggatcaggttgcttagtttccttgaacctcagcttcccatgtgtacaataagggtatgttagtgatatcaggtttacgaccaagaatgagatgacatgtgtcaagtgcttcggataaggcttgtcatacagaggctggtttttattgtttgcttgttttcaatcttgtattggttctgtgagggaggtgaactactatcttcgttttacaaagaagaaaaccaaattctagaagagagagaagaaaataaatccagagctgtagggcttttgtgaactttccagtgtgtcctagtgtcttagaattattgttgctatgaggagacaccatgaccaagacattccttataaaagaaagcatttaactgggggcttgtttgcagttttaagggcttagtctatgcaggaagcagaaaggtatagctctaggattacaggtagcatatgatgaacaggtgagttttcagtttcatgagcaaaaggctaatgtagcttcaggctatgttagcccacagcaatgtctattcctgctttgctttctctggcattctcagataccccagtctggctcaggaagaaaggggcctttgccattatctagaaattgtcatggactctttgcctgggccactctctcccaggccactgctctaaacacttgccttaaagttattttatgtacaggtctttttgcacaaacttgtctgtctttggtcccgaaagagccctctggaccacttgacgggcttctttgactctagaatactaggtctcagacatttgggtgccttctttctttgtgccccttggatgtctttgcaaggttcccagggaggtgggtgtactgatagattcacgatcccaggcagtggctgccttttgtcctcactcaagtaatcctggtgtgtgtgtgtgtgtgtgtgtgtgtgtgtgtgtgtgtggtcacagaaaaccttgtctctgttaagtatgacaccttactttttatgcctgtaaacttgaaatgaacacaaattagagcactgaatttgtgatctttgatcttagagccttgaaagtctggcttttttctatggacatctgaagtctgtttccccaaagtgagaaaaaggagcacgtgttcattttggtgcaaggatgataagctttaggtcgcagacaggaaagtaaagagcagaagcccacaagcagagtacagcctgctgcatcaccacgtgggtcgtttccagtgagcatagagcaaccattatttctctcctgggaagttccagttggccagagaacaacagctcaaatgccttcatcagcacagtttacgcctaagttctcaccagcctctgagaacagaggcttgataatgcagcaagctcccagcttgtggttttgtggctgtttctatctaattacacatctaattccatttcccagtcttgattaaaagtcatttttctccctggaaaccacgtctccaagtacttttgctgggccatggagggcatcagagtggtgtgcatgaggataagaggccaccgggatctggctggtccaagattaccccccaaatcacttcctgcaatcattgctggcttctaattaacccagagcatctttgatttccttaattcttgaagtttatttcataacaatttgaaggcacggagagaggggcagcttaagaattctgtttaggctgggtaatgtagcggtgctcccccaaagtcctaattaaccatgaaattgtacacaccaccctgttagtaacaagtcccttaatgttcacattcactgggagtaattgcgtcatttctcagggctgctgctctgtcccaggaaggggccaacactattaatcacctaatgcagaataagtgattttcagcttatgttttaataaagtgccgctggcttgggccttgaaagcaagagttggctcagctccacccttgtggattattcttttgtcttttgccaggctcccctcacccatcaggggccagggagtgcagggagctgagtctttactccaatgggtttcctactgggactctgcctttggtgatcaactaagtttggtgttttcagtaactgaggctgaaatttcaatgagcttaactaagattaattgatttggagtatgagcagctaattattttcaatgtactcattggtttcgaagcccagggaaacagtaccaagctgaggctgcacaaccactcacaaccattgtttctacaacactgggagaggcccttgttgttgagcagacctgggtagaattcccactgggtccctagctaagcttgtgatctcagcaattatttgatctctctgaacctctgttgtcctattggtgaagagagtttagtcacccaaagcattcactgttgttaagtaagttgtgtagtagcaattaacggctgggacattttatgaggattttcatcataagatgagaacacgacaccctctttcctgactgtgtcacttgtcaagaggctaattctttcagatgtcatagggagattaagatagggggatttaggtgaatttatggttaattatatgagatcttcatcaagccacctacttgggagaatagtgtttgatacaaagaacagagaggggaattcttaattatctatatgatgtagtcatgttggctacaacccagaatttagtcataggtctttgtgtgcctcaagatctagtgaaaaatgagcacctctgctcacatcccacagcaacagtatctttcctatcagcaagcagtcacaagcctttcatgagacccctagaccttcctagaggttggctgggtgttttgccatcactcagggcctaacatttttctcttctctcatcctgatccattttttcctaggttgtctcgggagctccaagcactcactttttcctttacaacacaggctatattctctttcttcaaaatcttgggccagtcagcacccagtcctatgtggtccatttgcagccatagctattttcaaatatcctcaacagacaattctcttcaaaagaaatatcctggtctcacttgtcaaggtaatttcccccacaccattactctatcgatcaccacatcatatgctcattctgtgttgtagccactgctgcatacaatgtatatattatggaggtccataatacggagcctaaggctcctacatagaccttcactcaccaggtgactgcagacttgagagtgaggtttccagaacgtccagctttgaatttcagcgttgccatcaacggctgcaattttcagcaagctagtttgcttccatgctttggttttctcccatggatgataacaaaggctgctgcattgggctgatgtgtggattaagggaattaatacacattaggctgtatcaacaatatttgtgcatgctaagctttgctcactttgtctgtgtgtaatccatttttttcactggactataggctccatgggaacaaggctttgtatgttcttgcacctcagtgttgatgagtaggaccggcacatggcatttggccctccctattctgtgataattttgtgtggttttgtctggcactgacctgagaggcctaaagatgcttttgctttaggccaggacttactgctgcatcattcggctcaatagtcaaaacagcatttactcttactatgtataagatagccaatgaagataagctgccaaattctacccaggaacacagggttttggcttcccctttagcagagaaatgtgaggcccctggaagtctggaaatcaccagcctgcccatcacctcccctttgctgcttacacatctggaagagctgggaattccatgtgggtgtgggattgcctgtaatagcgttggttttttatgtttgttttttttgtttttttgtttgttttttgttgattggatttccctgtttttgaataagattccccttgggagataaagtctcaggacctctgggaagactgaccttgtcatttgctctctatgcaacagagaagaacagggtagacagagttgctttaatgaatccctgactgtacttttccaaacaattgaggtctcttctctggattagcaaggtttccatccttcctgcctctgtagaacaaacggctggcaattcagacataaccaacgtcaagtccacttgcttacatgtcaacacctcttaggtcaatgctcattttgagtctatgtgctctgactgcctgagaattaaaacagacagacattgcagcagaatgccactgattccattgctcttacattcagcagacatgcttatgtcacctactgtgtacctggtgtccattagacataatgggcagagaatccagcatggctttgttcccttctgtctctaagaactctgttgtagggagcagtgtttctgtcctatgcactgctggaggtaactatgaactggtattatatataacatgggatctgctttcttaccctcctatgcacattgcagaaaatgattactaagaccccaaataatcatataaaataattttgtgtttattttctattgactttcatcagtcaccttacatagagctatgccaccttgtaggtaaaggtctctatcactatttgaagttccaggaagtgccactttcggtagattggtgacattcacagtaagagctaacatctgggaagcagaaatggagggtgtgagcagttgctttttaaagagtggccagaactctgggagctagattatttgcagtgtagtctgtgtagttcccgagaggctttcactgaatccagttgagctgagtttgggagaggtcggattggagctctatgcagatgcagagccgacacagatcagctatagcctgcagcctgcctcctcaggcccttacctgcctctgtgactctggagcctgtgctgcagtaatgagggtgcatgcaggggcctgaggcaagaggcctgcaggagagctgctggctcagcttggggaatacactcccaggggaacaagatgctcccttcctcctctgtccttgggatccctgcctctctcctcaaggtttgaccctgcccccttatcataacgaagtttctaccacatgctgtaattatactgggatggagaggaactgcttttcttttcatctttaaaaaattaattaattcatccattaaattctgtattccctttacatcctgattgctgccccctgttccctcctcacacagtccttccctcacccccccccattctaatctaagagactggagctccctgccccccaggaatccttactctggcacatcaagtctctgtagggctaggcacatcctctcccactgaggccagacaagcaacctgattaggggaacttattccacagacaggcaagagggacacacagtagtgacagttcctgatccatttgttgggggaccaatatgaagaccaagctacacatctgctgcatatgttcatggggcctcagtccagctctttgtatgttctttggttagtggttcagtctctgagagccgccaagggtctgggttagttgactctgttggtctttctgtggagtttctatggccttcagggccttcagtccttcccccaactcttccaacagtcccaagctctaaccaatattaggctgtgcctctctacatcggttttggtttcagtcagctcaaaggacagttatatcaggctcctatctgcaagcataacagtatcattaatagtgtcagggattggtgcttgccattgggatgggtctcaagttgggctggttattggctggccattccctcagtaactgctctatccacaatccctgcatttcttatagacaggataaattctgggtcaaaagttttgtgggtgggttagtgggcactattactccagcggagttcttgcctgactacaggaggcaagaaccccatatcctgtgactgctgtgagtctcagctaagttcaccctcattggttcctgggagcctctcccattccaggtctctggcccatcctcgagatgtgacccccaaacccctgtccaccatgcacagatttccattccttcccctggccctctggccgtctcctgtctttccccacacctgatcccaaacctgcttttctaggtgactgaccttgacttctttgtttcttcttaggagctttaacatctttttaaaattagtttgtaacaggcacataaaatataaaatgtatatttttgtgggggtactatgatgattttggtaggtgtgtgcaatgcttcaatcaggctaaaagtccatgaactcaagcatttgtcatttctttatgataaaaaaaccttcaagctccttttttttttccagctctttgaaatgtgtaggacatttatccagtctgatctctctgcagtacaattcttgcctcttcctatctgtaacccagaacctactggtcagccttcccttcctcctccctcccatgacctccactctttctagcctgagctagcttcaatgccaggtccaacttagaagagaaaatccttctgatgggtctatatgattgactttgctttctgcttgcggcttacttcccttggcagggtgatctctgtttctacccacactaccatctttttctgaggcactctggggagagggtagagagggaggggcctcgcccagtgctaagatgatgggttagagttgacaggacagaggctgactcacttccccctggctgaacagagactacagacatggaggtacacctcctgtctgtctctggaaattgggacagtcatctagcaggaggggaatgagggggcatgatttatatgaacccctaagctcatacaaccatttaaaggattcaaatgaagctttgtaagccttctcgggcacctgcacaggcttccttttatttggctgatcagagaaatttcatggagactaaacagggttcccatgccatatgccactgcgcctttcttggtccctttgggtaggtcccttggatagatccggcacctggaaagaagggctcacctgctcaagtagaagggccctcagtaggcatcaggttatctggggcagggatggcatgttagcagctggtgaaaagtggtaggaactgtctgggcttcactgaaggttcaacacacatctctgcctttggatgacactctgatgacagagctgattctgtaggctttcggagtaactcctgggccctgggttttagtttcttagtgttctctattatatattacagaagctgtgggtagcaaatagattttatagtcctggaaactgaggctagatagtcaatggattgttctaagtcacacttaccttgacaagtgtaacaacaaggcaagctggggtttgagcccaacgagtatgattctcatgcattatagcatacccaggatgcctcaggctgttctcagtcggctttgccagggaaagtagtcatcggtcttctaccagttccaggccatcacctttcaatagcatttacctggaggtttctacagtcttttccccaagactcagacctgtagtccggagtccctaagaccaatgtggcaatgctgtgcttggtggctgtggtgtctgcaagactgtagactttgcaggtggtgggtacacaaggtctcaccagcttgtcccaggactcattctggggccctttgcagggtcaggagaattgcccctaaacccactgctttaacacattgtcagaaagtttgtacacgtgtggtggagcagagtggtcagcctcagtggctatacaattgacgtccaaatcacaggtaaccacgtgcaagccagtgagcaagaggcaatgagaggagagaggctaagtcctgagaagccatagcagaagagaaggcagagggaggtagagctgcagagagagtgctaggaactgcatctacattccccagcctgtggcccagagagcatctctgcccagccttccacagcattcagatcctaccagctctgtttgtggctttcctgaagttgtgctgaaggtttgccactcggtgctacacagagtgtaccttattcagtggagatagcccttctccccccaccccccagaatttcttggtccacctgggcacaaggcagcagaaccccatatgtgttctcctgccacctacattctgcttctgggggccaattatttatacccaattctgagagcatcagacctatttagaaacatctgttttattgccagacgacaggcttgtttgggtgctgaatccagatgtggacttgctgctgtttcccccacaatgtgcctttgtcaggctgtacccagagagagattcagttagaagtcaggcctccacccagtcagctcccccagcaagcagtttcagaatagccacagtcctgtagccttttctttagtacatgatctttctttcgaatctttgcctaacacagggaaagaaaacaagcgtcccttcccaatgagctgcttttctttctaccatagtccatgtgtccttggtccagctctgtgttctgtgacataaaaagttggatatctgagcagatgctctctagactccgatccatgtctgtaatataggtccacctgggcacaaggcagcagaaccccatatgtgtcctcttcccacccacattgtgcctctgggggccaattatttatatccaatgctgagagcactagacccatttagaaacatctgttttattgcaagatgacaggcttatttgggtgctggttggatgaggttgtgttataaaactctctagaaagcaaaagttatagggccttgctgaatgctaggctttctttaccaggatgactttggcttgaagaaggatctgggattaaacataattgtagtgagaggggggcaaggtgacactcctggaactaggaaatatgagcaacaggattgctttttaaggctacccaatttaccagcacaaagttaatctcatgtccaagggtctcaaaggacaaagttcaaaatgggctgtttgaatgggccaggttggaggttggtttgccaggttgccaagctgaaggacagtcatagaggtcagtattgattatgtaaactacacaagggggcctagactccttctctagtgtggagcacagcacctaaaactaatgggatcagagggtcctcggcaagcacactatctctgcagttcacatttggttaagatcctttgattccctcccccgaggaagggcagagcctgtcctgggagtgtgagattggagtcccaggcttgattttagcttttgttctaattgacccaccttgtcctcaatgtgagagctactcctgtgtacctgtttccattctgtccctttagggatggcatactgggggcttgaagttggtcatgccaggaatatgattgtgctgccctgctgggtcagagtaccttaggctgggtgcctttaacaaccaacgttcactctcatatagttttgcaggttgatttctgaatcaatagaatagtttttttctgagcaaccccccccccccttttttggcttagaggtagctgttttcacactactgaatgtgtgtgtgtgtacaaatttcccaatattctcagcagtcatcttaaactgtggcttacctatataacccaattttaacttcacatctttttaaatgctctctttccgaatacagccacattctgaagtgctgcaaattagagcttcacactttccaacaaggggaagagagtgagtctgtagtccagggcttcccgctccagagagctgcatgttaattaccggccagcacaccgctggccagagttcttactgcccagtggcctttggtgtgtctatggacctctcagaacttggctagtcctccaggagaaaccatgtttgggcttccaagctagtaaggttaagtaataggctattggctgtcctcagaggaatgcatttcttcagggacatgcaacttagaatttttctttcttatttttgtgtatgatataatgtgcttgcatgtatgtgtgtgtatgtgtgtgtgcatgcatgaatgcatgcatatatacatgtgtgcacaggcatgtgtgtgcattcacacatgtgcatttgtgtgtgtgagttcaagcacacctgtcagaggatagccttttgtattggtccttgccttccatcttgtttgtggcagggtttctgttggtgttacccaataactagcccacgagcttccaaagaagctctctcatcctccatctcaccatagacatacttgaaatactgagatgagctactcttctcagctttgttcttctggggacttgaactcaggtccttatatttgcacaggaaatgctttatgtgctgagccatctccctggtccagagagtagtggtcttaccagctcttcttacaacctggcctctgatctatatacttcagtccatccagtaccctgcaagggttcacatcatcactactacatccattcctcccgaggcacttggctagcaccatacagctagtacatggttgggacctagcctggatgcttctgatcatcaggctccgactctctggggcctcagatcctctgcctcttcacacattctaagtaactaattgtcattagttctttccagaggccagatgttggtccttgacagcttttgttctgcttccagggaaagaagtaagtctttgcaaacacctttgtagcttgaagcttggatagtaggtttgatttttttttttctggctgccttgagcccttgttccgtctcagaatgtggtatcaaaagggcacctttagaatccactctgattgcataagtatcttgaataatacatctgtaatttgtgacatatattctctaagcaaaatatagtaagccatgcttcagggaacacactgtgctgttgtactaattaatttgtcaagttgtggctaattataaaatgcactgttgcttactttgatttgtaatgtagcctacattgttttaaccactgagtgggaagccacggagtgtgggggagtgaagcatttcctctagctcaagaagctgtgggctggtgtctgagctgtttgcgtcatgacggtatgttcccagtgatcctcactgtaccctgtgaagccacaagtttcatctgtcagcagtgcaaacacttcacagattaggctaaggcctttagtttctgagccaggaggtactaggggacaaccattcctgctggcttcctctggccacaggggtgctcggactctgtaaggctgaatgttgacctcaggttggttctccttagagctagaagtgacagtctcgcaatgaacatggtatggtcagagtgccaatggttggctactaagacatcttaaactttggaagagccatcatgttcagagttgaatggctttcaaagcttggttttgctaacagatttagagagacttctgtcctagtgataaactcaaggcaactattcaaaaggactttgttcttccaggctgaaagtctccatcatctggctctggagaacacacagccattgtctctgagtgagcctgtcacttgtctgacaagggactgtctccttagactctggagtcctgcacattttctcttgattattgttccctgagtgctaccaccttctgtctctttagacttccttctaagggaacatcccaggctgatcacctctaagtggattgttcagttcttttgcccagtagctttgccctttgtggaaactcacaggttcacttgacttaggctgcagaaggctctgcaaagctttagacaggaactcccactcctagtgtctaatgatgccagtgttctgatggttcgctggatcctgccaccctatgctcttcttgcagagcattgcacttgtggctgttggtatgtacttcacctttcagatgtgtttttcaattgtatggatgtgttagttttacacccatcatcttttctctccagcatcatcatattgtatgtttccctagggtatacctgatacctaccctaaggattgaaactaagggcgtttagtaaagtacctgatgaatccatgaaaagtttagcactagatgaactctgggtcatctcactggtccactctgtgctactagcctgctttgagcatagatactgttcataatggagtcttttctcccagcaactgcaaacatcaggagggtatagatactcagtctcctccatcagaaggcacttaagaaattagacagctgcaaatgtaaaatggatgtgctggaattttttgtgacttataattaaccaacctttgaaattctatcctaaaggattgaattaagtaattcagtctgcctaaagaggggatcggacagctgtatggataagaatagcatatggtagcatggagtttccttttcctgtgaaatccatgtcagagccgttagggaacatttcccaccctccatgatggacagacagcagacccagtagaactgaatagtggaaataaaggctgttgctgagagcgtggtaatggatactgccttttgactgatcaaccttcatttaatacatgccagtgcatgcagtccagacaaccgtgtttcatgaaggcagctagaatctagacccagctttttgtaattttatgcacttatttatccaggcattcatccactagcctgtgcatctatctgtctgtctgtctgtctgtccatgtatgtatgtatgtatgaaagtatgtatttacctacctacctatcatctatctaattatctatcatctatctatctaattatctattatctatctatctatctatctattcatacatccccttctgtcatctttcaatcatctattaattgaattatatatacatacacgtgatgatgcattaaccaattaatctctccagccacccatactcacctgtcttgaagtcagtcacctattattcatctaatgactcatctgtttgttcactcatgtattcctccctctgttagttcattcattgatccatccatctcccacccattcaagttcatcattcatccatctgggcatacaaagatgaaaatatttgagggtcctattctgagcagctcagtctagaaagggaggccagtgggggaactatcataattgggatcttcccatgaatattataataatattattattatatagtaacattcccatgaatgttattatagaggactttccagataccatcagagccctggaaagaccttgtgctaggaagtgggtctgcgaaagcagtgtagctttgtagagagatgtgggtttgaatcctggctctggtgagcatagtttcactgtggacaagtcacttttctactctctataaagcagatgaagctaccctgcccacttcggataccttgagtatccactaagatgatctcagtgaagggattgtagagctaccattacagctggggggtgtggcagcgtggtgtctttcttttcatttgtcccatgatagactcctctttgcttgatgtttttcgaaaaatacagatcctgtttaaagacacacacacacacacacacacacacacacacacacctacattcacatacttatcgcatatacagaatccaaaactcttaaagcagcattaaggttttctgttttcctgggtaacatctaaggatagctgcttctaggatgccattagctgttctagcacacctataagtacctcatttaaagaattaaatattaacagcatttcagagccttgggatttctatttgatcactctgaagggtaagtttacttaccataagctcatttatgattctgaagttgtaaatttgaataacgctatttctcaaagatgttttgtcagtgaattcaggtgtggatgctgaatcttcgttttccacaggggaggccttggagtaaatggggatgaaatggtccagagagatgtcctctgacctacagcctaatccttatttgactaagtaggaatgcactttgtaccttcagcaccaacagctggttaggggaattggtggtcatgttgaattagcaagaattaccatctgcatcttgtcatatccccagaggccttttagctctgtgggtacattgggagagggctagcctccttgcaagtctgggtaccttggtagttttgagagctggtttagacagagcaggttgtgggtgctctcagcctacgcccttggcaaggactcagcagtgagttcctacctgggtacctcagttctatcctgtagcctacatctcttagtggagaagccataaagggtgggagtggtttccacataggcttggtttggctttagaaagtgaagtcctcactcagattctagccttctctcagtctgcattctttttcatcccttggatgacacagaagactgaagcatcagtcacattaatgggcctcctgttgtctgcttttctacttctttctcctcccagaacaagccaagaagggcaccatgtgctcatgagctcttaataattgtttgtcgatgataattagaccacaggcaatttattaccagaaaattgatttttcacgtttttcttatatgtctccagttcttctacttgtctcagaaaaacgatgtcaatttcaacaaagtctgtggtctagagagggaccaactcagtgtcgaagaaaaggcagaggcatatgagctggttgctcaggctaatggacatgtaagaagttctctgttctagctatttgaattttggcaagcttaactttctgggtttcaagggtttgtaatgtttctttccctctctcctgcaactatttaacatgccttgtgtcagctaatgagctacatttgtgaaccaggccccccccccccacacacacacacacttcatcatgtagcctactatctgataaagtgagactgataatggctacacaaccatatatacacagtgtgtccttataaataccatgaaaacacatagatatgaaggaggacagggatgagggcaaggggagccatggtggtatggagacattggagaaatctggagtgggcatgagaacgagcaactggaaccttggagaaagagcaaccaagaaaacttaggagtcagcactggatcaggatacatattagatgctcaagaatctcctaccctccagtcccttagggcctgagaagctttgaaggaaaatcagattctactccaaattggaagctagcagagggtttgagcaagtctgctgtggagaacagatcatagcaggacatgaaaggaaggagacttttaagaacaacattggtacagcaaagacaaggggtgacagaggcattgacaaagggctctagggagaagttctgaaaatcgattgagttttggatgcatttgaaaggcgagtgacaggaacctgagtgaggacggggtgtcaagagaaagttaaaggctctgccatcactcaggcctgagcaagaagaatgtgttcattttattggctgaaggggttgtgggatggcatcagagatatctggaagccaggaagttggtttggattgagctatccacttggacatgtggaggagacatgtgaatttgtcatactggaggtgaggaaacatgggttgtagacaaaacttggagatttgctaccgcctgaatagtggaaggctgtgaccacagagaacagtgggcagagtgaggtgagaaggctggctctgatctcagcagggtgctgtaatgccccagggtgagagcccagaccagccagctttctccacctctcagaattaaagttttgacttttgcattttctgtttcagaagtctactggaagatgtgagactttttttttttttttaaagtatgaatagtgtgttccagatggtggagtcttcatttagttacaaagctatcatgcacatttataggtgtgcccctttcttatggcccctggggactttctcccttaagaattcgaagaaacaagggcgggtgcccagactcttgggctgtggctcagaggcctgttcaaggggagccctggatacctggagagtattttatatggcacgtacaaccctacaacacgaccattctgaagtcccactctgccctacagatatgcacatgagcacatcgagatactacgtctaaaggcaattgaaatcattcttagggcattctgtacaatcagcatatttcctctgccccctatcattttcataggaagaccagaatctgctcactggttggtctgactctcctgaaattatgtggtaatcagagcagccagagatcctggctcctaagcccttgatcaaggtggattcaaactctaaagcttgctatgtttaacaccattctcaaaatggagtaagtaggactgccctggacacagtggttaacagacaagagttctgtttatttgcagatttgccgtgttcccggttcgatggggcagaaggacatggatgtgataggaacaggctatgcagactcaccattaattattctatcaagaagcaatggctgtgactcgggaggcagcttgtgagtcaaacacacctggtggctgagtgccagctcagcctctcattagtgtgattggagacaagtcatttcacctctctgagcatgagttttctcatctgtgtatcaggggatggtaattcttactttcgtgactgcttgtgaggatccagtcagataacgtccgtaacggagctggctcagagcagagcaaagtgtgagctaggcgcatgctcacacactttgattctcttcactcatctgtatgcagccaacaagagagtcttgatgacagtagatacaggttagtgattaacagtttctttaatgactattgtaatatgagccttggttttatgtcaataaatcaattaggaattctgagctgaggaaacagaagacagtatttgatgcaaaacagagacagtgtgtatagatgaagagccagcagctaacatcttttcctgaagaaatcttggtctcaccgggacatcagaaagaacaactctgtattatctaatatgatggcacaagccactgtcaacacttctttagatctggagtgaaatttgtttcatctgttaaaatcaggcaaggagttcataacaacactagtcacagtaacctacaaacaggagcaatccaaaggcccaccaactatgtgatgaataatggaatgcggtacatctacacagtggaatattattctgccataaaaaggaacaaaatactgagatgtggtatagctgggatgaaatttgaaataactatgttgagtgaaacaagagcattgtctgattctagaataagccacttcatatagacaggaagtaggtcagtgtttgtggggaccgcaggcagtaggcatggacatgggacttcctgtggaggtgataaaactgttctagaactggatggagatgatagctacaaagcaatgtagtagcgttgtgaatgtatcaaatgccaccaaaggtcagaccctacaatggctactgtcttagttagggattttctgctgtgaatacaatggctactgtcttagttagggtttttctgctgtgaacagacaccatgaccaaggcaagtcttataaaaaacaacatttaattggggctggcttacaggttcagaggttcagtccattatcatcaaggtgggagcatggcagtatccaggcaggcatggcacaggcagaactgagagttctacatcttcatccaaaggctgctagtggaagactgacttccaggcaagtagggtgagggtcttaagcccacacccacagtgacacacctattccaaccaggtctcacctattccaacaaggccacacttccaaatggtgccattccctggtccaaaaatatacaaaccatcacagctaccatggtcaatttcatgtgatactctatctcttgccatattttcaagataaacggggaaccaggatctctctgaaagtatcctatgtctagcatcccctttcctgcctggtcttgccttctttgaaccagacagtcccatgtgctttagctaagtcctttgttatctactgcttcttaatgaaaatagtggcactgtccatacttgatagccacactgaggaggtgttttgcgttttctcttgatgcacagattccaactgtgcttatgtttctgcattggggctggtcctatcaccccaaacaccaatctcttgctgactaccataactagtaccatctattgagcacttagctacactctgttgggtctgagctgcctactcctcactgggctcacttctgggtccccagtggctggcaaagggcagaagctgaatgtttgttaagtgagtgtcactggagtagatgaccagttggattcaggaaatgattttttctttgacagatacggtcctgctcgattttaaccacagtgagtctgattcctgacttttctaagtaaagctgcttccctgtgctgtttggcatccacagctcatcaggcagttggaaatcacttatatgctcagaaatggacatttcagtattgtaaattttaaaaattaacaaactggcaaaggatcagtgcacttcaagttgcggcagtaagcaagcgttccatgtttgcatatgcgcacatctcagatattacccatcaaatgcaagcatatgtctgtaagccgccatctatatgcaaatactttctggtgtggtgcttatatcccccacaaacagtgtgaaatgtatataaattatgcaataatacagatattgcacatatgttagtttgagctaattgttgtcagaattctgagttttcctgggcttgtgctgggcatgtgaatgctactcttgcaagcttggagattggcaccagcaatggtctcactgcagcagagtagggggtcttggtggtacaacaggattggttatctgtcccctggccagaaagtttagggcctagaggcctcgcttttaggtatacagcctaagttcagttttactgaggatctggttaggggaggaggtgctagaacacttgctggttaactgaaatccttagactggattgttaacacagtaaggagtccaactggctgctgtgctggattctctcctgggctgggctgggttgtataatctccaattgtagacattgcattggacgcaagcatcagtttctatcttaggctcaaaattcagggccatttcttgccagctgtgtgatacatgaggaaaacacccaatttcccagcactttcttcctttgtgaaatgagatagtggtccacgtctaagggctttcaggacaaagcaatgtgattggcatgtgtgtatatgttgtcctttggtggagccccttgattctggtatcacattagcaaggttatatagtggagagtcctttttacaaattggtatttgggattgaaactagggcttcatgcatgctgaacaagcgctgtgccatcacatcatggggtgaatgctgtgccactgagcatgcccccaactcctctttttgctctttactttgagaggagggtctcactaatctgcccaactgggattatgggcttgtgtcaccaggcccagctgaaaagccagttcttgtgggaaaactgcttggtttctgtattaagcaagtgaggctacaggcagggcaacacagagggatgaaacctctggtcttcagggtggaggtcatcccccacagcaaacacaggtaagctcttgtcatcactgggtttgaggaattgctcttacactagataccaactgcttcatgtgtatctgattatctagttctcactccccaatgcagcactgacaccaatactattcctatttacctgagactcaccaagtggaagccatattccctgctcagagtgcatgaggaaatcaagaattgaggtcaagcctatatgaattggagaattcaactcttgggccaactcctccaataggcatcctctcctaaagtagaaggtagaatattctgagaccctcttatcaagtaccttggtttaaggatgcttaaggtcactggatgtgtttcaaatttttgctcattgggacatcacgagctcccccatgtacacttttctataatgagtctggaataaacaaaattctgccataagatgcttggacttccactttgcattcttttattttttgctgtgtgtttttcttactctgccttggaagatgggctactgtctttccttgtgtggggagcaggaagtctccaacatacctggactagcagagaaggatagcataggaaatagagcagagaggaaggcccactagtcagccagtcagccagagaacagggatcacagggatgccccatgggggagcagaatgagtctgaactgcagccagcccgagaagtggggttcagaactgggacacccttttccgggaggagtctgtactcaacttagatctgcttacttggtggagctttggccctatcactacacagtgaagcttcactatggcatctcagagagctctgggtaccacttagaacacctcacaagcacatctagccaagcatattttgggctgattgaagttgtaggcatgctgcctggggaaaaaatagattttttttctcacttgatgcgagacagatgagagcagaagagaggccccataaactatctgcatgccgcgatcactgcctggtgcctgggtgctagctaccttctcatcctgcctctcatcctctctgctggggcttttaaatgggtcagttgcaccaaatggctgagaggaaagtgggagagaggggggaatgagagaagtcactctgagatactaatccgtctataggagctccatgtctcatcctagacagtccaattggagaattgcttcactgtggtccatgggctgttggagtgtagagtccatcctgtcctccttgctcccactaccaagatctcacccattctgagattcatatgacatcgaaacggaggcaagtgtcatacttttgaatgctcatagctaagagctgaatatactaatttttattttaaagtgcctagcatcatttattttattatagcaatggaatggatgaatactccttggaattgtagaggatgggaggagaagaggaactaatttggacaaccaacaaggacttgattgatatgtactagggagactgacatagatgaggttattttgtatgttattttctttcttcccttcccnnnnnnnnnnnnnnnnnnnnnnnnnnnnnnnnnnnnnnnnnnnnnnnnnnnnnnnnnnnnnnnnnnnnnnnnnnnnnnnnnnnnnnnnnnnnnnnnnnnnnnnnnnnnnnnnnnnnnnnnnnnnnnnnnnnnnnnnnnnnnnnnnnnnnnnnnnnnnnnnnnnnnnnnnnnnnnnnnnnnnnnnnnnnnnnnnnnnnnnnnnnnnnnnnnnnnnnnnnnnnnnnnnnnnnnnnnnnnnnnnnnnnnnnnnnnnnnnnnnnnnnnnnnnnnnnnnnnnnnnnnnnnnnnnnnnnnnnnnnnnnnnnnnnnnnnnnnnnnnnnnnnnnnnnnnnnnnnnnnnnnnnnnnnnnnnnnnnnnnnnnnnnnnnnnnnnnnnnnnnnnnnnnnnnnnnnnnnnnnnnnnnnnnnnnnnnnnnnnnnnnnnnnnnnnnnnnnnnnnnnnnnnnnnnnnnnnnnnnnnnnnnnnnnnnnnnnnnnnnnnnnnnnnnnnnnnnnnnnnnnnnnnnnnnnnnnnnnnnnnnnnnnnnnnnnnnnnnnnnnnnnnnnnnnnnnnnnnnnnnnnnnnnnnnnnnnnnnnnnnnnnnnnnnnnnnnnnnnnnnnnnnnnnnnnnnnnnnnnnnnnnnnnnnnnnnnnnnnnnnnnnnnnnnnnnnnnnnnnnnnnnnnnnnnnnnnnnnnnnnnnnnnnnnnnnnnnnnnnnnnnnnnnnnnnnnnnnnnnnnnnnnnnnnnnnnnnnnnnnnnnnnnnnnnnnnnnnnnnnnnnnnnnnnnnnnnnnnnnnnnnnnnnnnnnnnnnnnnnnnnnnnnnnnnnnnnnnnnnnnnnnnnnnnnnnnnnnnnnnnnnnnnnnnnnnnnnnnnnnnnnnnnnnnnnnnnnnnnnnnnnnnnnnnnnnnnnnnnnnnnnnnnnnnnnnnnnnnnnnnnnnnnnnnnnnnnnnnnnnnnnnnnnnnnnnnnnnnnnnnnnnnnnnnnnnnnnnnnnnnnnnnnnnnnnnnnnnnnnnnnnnnnnnnnnnnnnnnnnnnnnnnnnnnnnnnnnnnnnnnnnnnnnnnnnnnnnnnnnnnnnnnnnnnnnnnnnnnnnnnnnnnnnnnnnnnnnnnnnnnnnnnnnnnnnnnnnnnnnnnnnnnnnnnnnnnnnnnnnnnnnnnnnnnnnnnnnnnnnnnnnnnnnnnnnnnnnnnnnnnnnnttttgcttatgtggctataaacattttacatgaatcaaatagtgtaagtcaggagaatgttctagaagagatgctgaatatgaccatgaatgggttgtgtttatttatcacacacacacacacatacacacacacacacacacacacgtatatgtagggattctcaatcaacagttgttatgaaatgtagcaatttgtatggagcaggaaacataaggtaggttgttggggacaaattctttgaagaccggaagagtaaatgaggtcctatcagtacttagcttatggacctgcgagctctatggcatggtgctctgtgaggtgcttatggtgatccacagaacacagcaagtctgaaggacacagtgctaactagtgtgcattgcaatggctgtcatgataactccgctttgagtgctgcaggtggaaggggtggtcagaagccctgagagtgctctgcccagaagctggtgactaaggtctgtggaccttccctgtgtgtggccttgtattactgtctagtgtttctgagtctgaggaaacttcgttttgttaccatccgttcttcagtagacagatggccttgaagcaaactctcttagatatggtaaggaataaaaaacgttggcactgttttttaccatgaaaatatccattatggacagaggcctttggccttgtctgtgtttgtttctccttgtctatagcacaggggtcacctgtgatgaccagccacagatgactcgcaagggcttgaaagtggctgctgccacgaggtcctgaaagtttaataatatttaatctaaataaatttaaattagaagaacttgatacttaattaggaaaaaaactatgtttggaaacacttgattatgtgagtctacttttctaaagataacttttatgaagtctaaaatcagatgaagtatttctgctgaaaaatttaacatttagattggtatgtcttataagattatagtataccctagtttacaagaagaatgtaaaatatgttattagtagtttttatattgattacacatcgaaataactatgtttatatatatatatttgattaaataaaatgtagagttaacttgatttttccctacttctatttaccttttgagaagtggcaactggtaagcagttctagatcaaatgtacgctgggattacgtttccctttcccttttattttggtacatatgtttatatgcacatgtgcataagtgtttatggtggcagtatatcagcatttgtgtatgtgggtgtgaatataagtgttacactgtatggaggccagagacaatgctgtgaatcagccctcaccatcctgcttgtttgaaacagggtctcttggttgtttgccatggctgtgccatgtgccaggctggctgctctgtgagctccgagggatcttcctgtctccaactctctctctctctcatgaatactgtattacaggcatgtatgcactggcatgctaggctggagagttgaactttgggccttctgtttgcatgacaagcactttacccactgagccctttccctagccctaatttcagttggacagggttgttctgtcctttgtagacttacctgttggcattcccacacatctgagggtgcaggtcttcaaaatgttgggaggccaacagcttcatgcattactttgagatgtgggaaaatgggaaacatttccaggctttaaccagataccaactttattgtaaactggactttgggtatgagtgatgtgtatgtgtgtctcatatgttgggagggtatgagaagggcagtgacagggaggccacacatatcctggggcacaggttatatgggaactctgcactttctgctcagttttgatatgagtttaaagttgttcataaaggttatatatgtatgatgctccttccaaaagccatagggtaccaaccaaatcaaacaaaaaattccagtaccaggtattcaaccaagttgttggttgggagagaggttttccagggactctcagaacaatccagcctgttgctcttgctcagtggttaaccactagaacttgatggcaagactctattgccaaaaacacaacacatatgatcctaggatgtgaaagaatcagccgacgctaactcagcagcatgctctctttcattgtatgagacggtgctgggtgctaagaggaaagagccattaatggtcttacctagctatgagcactacgaagtacaataatggctggtctggcaagatatgcacattgttgaaaatagttaatcaacagctttctaagtggacatcaggcacattacacaggagggagctcatgtccagtattctaaacttggccttgaatccacagctggggaggtcacaggcccttggagagagcctactaattcaattttgctgatgtgccataatattgagctgtcttctaaatcctgatccttatacccacaggctcacgcaagtctcccccctctttggagaagcttccttatgttctggaaggtggcttacatagagactcactgagaagtggctggggagtgtttggcttacatagagactcactgagaagtcactggggagtgtttggccctaagcgagaaatgtacatcatctgagctagccccatgatgcaggaagcatccatggaagaggtgggaggaagatcatgggagccagagcttgctttgagccagtgtcttctggacgtgaccggctgttgtactcacaaaccgtgtttctggcacacaagatgagatcagtcaaccctccaatatgcagggacaaggagctcacaaggtcccatgcccagctaaggagctgttggcagttggtggccactggaagaataagttttcttcagtggtttggcacctgatattctgcctggtttgtgggtcccctacactcatctgtgtactgacagcattaattgaattcaatgggtcattgaaaaaatttaagaagaggagatgaagttgggagagaaatgtgggtcaggggttctggtaggagttggaggaagggatatgaaattaccaaaggacctataaaaaattacagtctattgtcacgtatggtggttcatacctataaccaaagaactcaggagactgatgcaagagaattagggccagctttgttacaaagttggtttccacctggcctgagctatacaatgacacactctctcaaacaaacaaacaaacaaacaaacaacaaacaaaaccccaaccaaccaacaacaacaacaacaaaacaaacaaacaaacaaaaccctagacaaataaagtctgttcaaagtcgccaaatacttcacccagaacaagaggcaagaaaaacagtgaagcaagatagcaagcagccccagatctctgggtacatacgcacattactatgttcaacaggggggaggcttttcaattatcccttacctgtcagggcatggatctgctgttaaaagcagatcagagctccttccagcccaaacctgagcacacctggtctcagagcagtctctcacttgcctccccacccccactaccctcctggccaccagaatctttctgggagactcagagagacttggaaagggagagggtgccttttcttagtttgactggcttctgtctacagatcaaggcttcaaataaagtgccacaattatgagtggattcctcccaagccttgatcaggacataggctttccgtgtggagtggctttcaggacttttatctgcctcccaggcagtctggttcaggctgtgctaacctcatttgagaatcagaaacaagaacaacttgtaaagtggttcctaagagttcctggggagggggccgggcaaggggcaggtttacaaatattaatctctgtgtgttcacttataaaaattcacttgcctctggatagggctttcagtatgtgcgttatatatcagcagacatcttttatttttgaaaagctcccaggattagctgccaatgttcacaaagtcttgagagtgttgctctcctaaggattctcctttattcagggccttttgccgtacttactatttccttctgttttgttccctaatgctggttgacgagttggtatgttgtaaattgtgagaccagagctgatgctggcgcatttaaaaagcactttctatttcccttacctgtcttgtttcttctccgactcagagtcaccttcaccctcattctaacaggcaggaaatcaagccttaatgacttttaacaaggtcattgagcaattagtggtgaaagtgggaactaagttcagcaggattccaccaggccccaccgaccaggcagggaccatgctacagcagggacagctgctctggcttagcggtggctgcagggccttggtccccactcatcagcttcggtggttctgtctaccatacagtatcctggtagccaacggtgacttctctcctgtgccaggccccatccttgctccgtctggttttcccaaggatgggtaggctccctggtctaccatctaaaggaaaccaatttctcttctacctgggaataggtttattcctaaatggatcgagtctcctctcactacagcccagagtgctgccagctctgaggagagtgtgcagaatgctaaatgagctctgtggctggtacatctgagacatgtttgtgttataaatgggtacaaattgaatttggctggaggtgatgtatgacacctgtcacatttacccccatggtaggacagctagaggagatctaatttttttttcagcgtgggcatttccaacccttcagtgtgtttgggatttctgtttcctctgtgtcgttactgaaatggacctggcaggacaccaggggctgctaaggactgggatgctctgctccaggcattgtgacccatgggtaaccagctcatggtttccttttggtttctgtcgatagagcttgggatgagacaggcttctgtatggatcctggtctgttactgactatccaggaccttggctgtgcggcttctgctttctctgtgtaagagagtgatgatttctctgcagggaccgtctgggagggttaagtggacaatttgaaaatacctttgctggctgaccactaatgtgatcatatatatatatatatgtgtgtgtgtgtgtgtgtgtgtgtgtgtgtgtgtgtgtgtgtaatctgaaagtacagtttgtggatgcaaacccaggtggctggggtatgcttgaaatggggctaggatgatgaacaggggtggggaggtaccttttatcatgaagttctgcctctcaccttcccataggcccagggttgccaatcctgaaaggatgctccaatgctctctggtcagtttgtgagaaaaatgtggctgagtattgttaccctgggaagcatcactttgcttaaagcacaggtgtctgatacagtgggtaatagcagaggaggggcttctaattttcagaactagagatggtgagcaggggtctgtaggcccctctgtgctacagaagctaaacttggcctagatgtagccctgagttggtttcagggcagtctcatctgtttgttacttgctctgtgctgccctagggtaggtaagtctgcactatatcctgcatcatttttacgttctagttccctgtcttggggtccctgttgtgcatcctgattcagggattgcagtgtccttgctctgtactcagagcatgtttcccaggagactttttttttgtagactttttttgtatgtggttactcaactgtgagaaaatgtttggtggcatcataggaaaggagagaccatcactgtgtggatgctgtcagggcactggtttgtgctgatggcaactatggaaaacatgccagcctccaaccactcagcctctggccctgcaggagatgaggctctccctcctaactgcagccagaggccatgtgctgcaagtcttggagtcggagcatcccagtactcaggctgtttgcacaggctgatgggctcccaaaagctaacaggaagtctggaaggagaagcccctacaacagcctccaaagctctggcaggctaaggctctgcccagcagaaggtgtggacacctgcagtgacatgtgcacagccaagccagccgtgtgttcttggctacagagcaataataaagaacctggactgttggcgtgagagacagccgtcatgctgtgtaagaacactgcatatgtatggcaaaagcattgctccagacattttggcatacggggttgtctgtctcgtagcatttgctgatgcttcatgtgagccttccttatctctccccgcagggctatgaggggctaggagtgagtgggaagcttcacttctgtctgctgcaggtgctcacagaattctgaccaagctgctgggtttcagggacaggttttcaatgtcaagtcttggctataacttgtagtatgcaggagctgttgagaagtctatgtccctgtggcagatgggtgtggcccttggcctgttgtctgtaaatgaaaatagaagctgggagatttgtcctgcttggacaagcccattgctacagatatttccttcacactggggctatgaagtgacaatacctttagtgtctgggtattaggggaggattgtgtgtgcaggtaaggatggagtggtgatatggagcggcagtagaagtgtctagataatctgttacgggagtttctgggaccacatggaaggcaaaaggggtgttccatggcatgaggttggggcactgatggtgaattcagggatgggtgagatgctgcacagtcccagacattggagtacatgtcaacatcttccttctagaacttgtgccattaaaacatttattagagtctatattataatgccacctcttgttctccccccgccccccgtgtagatttgcaaagcccaggtaaggcttgcatctatactcccttcttctctcttctctttttggaactgcacactttcatttgttaccataacatgcttagaacagattgatcacctatgttgcagtgctcattactttcatatacatggctcaatggtggaagacattgaagctttcaactagacagtatctgaactggatctctctctctctctctctctctctctctctctctctctctctctctctctctctctctctctctcacacacacacacacacacacacacacacttatgtatatacatgcttcttgtcctgggtccataggccaaatgaacagtgacccagatgtacctggtgcctgaagaaatctcagttctatagaaacagactgtgaatggtctggcactggccatggcttggcagatctgtttcgaaggtcagcagccttgaatagtatcattgcttaccagtctgccctaggacctgttgtccttcctcctccaactgtctcaactgtatgtgtagtcacatgccaggctttattggaaatgaagagaaaaggagttagaaaaggtgatagataactcttgatattcacccaaatgctaggaatatgaattttggttgttatttatgtagatgaatagaggatctgggactcagagagtacatatctcattataactaagtaaatggctggggcagatttgaattgaagaatacttaacagcaagtgtaccaatccttttttcctcatgaactgctgatctctgtagccatgatcaggtaaacttttcctggggtctctgatcctttctattttagggaccggcacaaagcaacattcagaaaaggcttgttgaagggtgaatgaacgagccatcacaagatttaagacaatgttgatacagtgtcctaaggataatgagtatgggaaaatgtctttgattctaaacccatggtttcttagccacatggttatggacattaaagtgttccttattaataagtgtaccttattaaggtacacataaaagaacatgataggtttatagccagtcattctctagagtccttgaaaacaagatgtcacagaaggtgaagagacatgagatgcagcaaaggaagactcaggaccattcagtcacatcgtgggcgtccatcctgtgcatattgaggtcctactttgtgccggttgctcttctcagctccggagggatatacaggaaggagacagacaggcccatatgcagcaccatagactatatagcatgaatgtgaactgcttcctggcctcatagatggaggcttccttctcctaggcttcttttgcctctatactgttgccaccctccaggtttcagagccatatgtaattagggcagatctgcagacaaatatttatgggagtggccagatattcaggtgaaggtccaatgatactcctccatcctgctcctgctaggagataatgccagttgccgacaggcctcattattattattattattaattattccatttgtttatatctcaaatgatatcccactttccggttacgccctctgttgggaaccaaaaaggagagcccaggggatgccctggggaaggggagacccacaccccgccagagttttacctcttctctggtctgtcaggtgtgggagggctgctatctaccttctactcatccctgggtgggcatctaagcctctgacccactcttcgggggagggggtggcaaggggcagccctacctggaattcccagagctactttgctaaagccaccggggttatgggagagagggatgagggaagaggttcccaacacctgtgagagtgagtgcagtggatcttgacaggagcacaggaaggccttctaacgggagattaggagagagcctgtcccatcctccaagcacaatgggccttgatgagcagagacattcaatggctttagagctttattataaaaaggcatggagaaaaagagagaaggtagaagagagaggagggagagagagagagaaagttagagagaaagaaagagggagagaggagaggagaagacagagaggagagagggggtgagagtgaggggtaagaggaaggcaagtaagagagcaaacagggtctgaacagccctttttatggtcttttctgttgctaggtaactggggaggagtttagcctaaaggtcagaaggttgggccattgcctatgtaacttctagccatgcttttcttgtgggggttgtgggggggtggtaacttaggcaagggccagagttccaggagcataagggaacgcctaccatgtcatttaggtgaattatcacccttcgggggttcagacctcagcttgactggagaccagcctgtctgtgcatagcccaattccccacacccctccaccactcctatcccacatctgctctcccccctcccttttgcctgtatgagagttctccctcacccacccacactctcccgccccactgctccagcatccccctactctggggcatcaaacctccccaggactaaggacctcccccctgttgctatcaggtaaggccatcctctgctacatatgtatctggagccaaagattcctttaggtacactccttggttagtggtgtagactctgggagaactgggtggtcaggccagctgatgttcttccaatggggttgcaatccccctccgctcctccagaccttctgccagcttccccaccaggttccctgagctcagtctgatggttggctccaagcatccacctctgctttggtcagttgtacaggcctcattatgatggactgtactgagtaggcttagctgatctcatgaaaagggcagcagcctgacttagcggatagcccctcacagcagttgtgattcatctagcttgtggcagaagacccagaatagcttttttttccttttattttgtagagtatattctggcatgtagtgggacatgtctatagtctaggtgtagggggacatgtctatactgtatgtgtagtggttcatgtctacagtctaggtgtagtgggacatgtgacttcagaaaacgtaaccactgctggcagttttctgttattttcatagaggttagttatttgtttgctttagatatgagcttttgccttaccatgtgctctgcacctgctaatttacgctctctgtctttttatcacaatgccatcagtgtagactagcatgatgttctagtggatgtcagatcatatttttatggctgatgtggctccaagtcagaaaattgatcctctgcgaaggtatatccctgaaggtttgttgtatcccttttggttagtgttgtgatgtgggaatgagaagtactggtggatcaataaccatgtcccagctgctaggatctgtattgatttgatataatcgacagaccacaccaggaacagaacctacaatggaagtcactacttagttaagtttaggaccatccattgccagtctctgtgaattattatcttatgcatctgccaaagcagaagttacagagggctctgactgtgggcatctgcttttcaccaaatagttaatgacagggttgttttctcagattcccccagggacagagtggcactttgttgtgttacttttgtaggaagagaggtgtgctttctgtttgccctttctgctgtcttccctctgattagagagccacttgggaatcttgaatcattgctgaggatatccattcctaaacacacttaggaaacatgagtcaccattgagaaggtatgagggcccaccatacacattatactgctggtggtggtcaaaactgtgctccacgcttggcctctgtgatgtgttgactgagaaacatctctagtaggctcagggatttgaaaatatggttcatagtgatgggactgtttgggggaggtttggggggtgagaccttgctggaggaagcatgtcactggagatgggctttgagcctcatagctctttcaacgtgtgctcctttctttccgtttgtattctagggtgtgagctctcagcttcctgatctgggcaccatgactaccacttgctgctatgccccctgatacaatggattcatcctgtcaggaatcataagcccaaataaacttcttcttatataagtggccttggtcatgtttttgtcacagcaacagaaaagttatagacacagcaacctccattaacccctacctggccttgggcagactttggtttttagaacttcagattagttaaaatccactatttagtatgccccctccaaatcatgtgttttctttcccccagtacaaacttacccttctaagcatctgaaacaacgttactgctgtaatataacactccacatagtttacaaatcaaatgttcttagagttctgaggttggatcccctggatcactgtgacatcaggctggatgcctggggaaagcacacttcctggccagtgagaggcattttcttactgaatgttttcattgggaaatcccaaagaaacgctctcgggcttcttttataagagtgctggtcctaaatagactctggcctcatagtcagttgccaaaattcctgtgcaagatactataaagtatcagagatagcttgcagttttggagtcttgagcctagggtaaggcagcatgttatgttgggaatgcatgtcagagcaagacctgttacttcattactaggaagctgcaacaagaagactgggggtggggtagggtaggggcaggttccctcttgccacttgccatttatttttcatgtatgttcttctatttgtgtctgagtaagtttatgtgcatcatggagcctatgaaggaaaaacagtgctggattcccttggagcttgcgttattgttagctgtgagctaactgatatggtaggtagttaagaactgaccctggcttttctacaggaatagtaactgcagagctctcttccaagtcccctattcctttgtgatggcaggcatgcccattaacttttctcaaggtatcacctctcaaagtccctaccttctcagtgctactacactgggatatgcccccattttgtggcttcgataaggcctttctactcacctctagtcacacaagttaagtgagtgctttttgggtcatctgtctacttttgttttttgggtctcaaagtcagttaccatcagcaagctcatcctgtgggtgacagtcttatgacaactccatcagctctgctggtttttctggacatggggctcactatacctgatactaggatggtttcatctggccttcaaaaatcctcctctgctgaagtctggggacagttgcaattgcccttgactgtcccttcaacctgttgagactcactattaaaatgcttttatacctctcacctctgtctctcaacacttgctaaagacaatgaccttcaggagtatagtgtgttagtggggtgcagtaaccatggtgaacgcaagcattcctttcatctttgaaccttttcttttatattacatcaaagagatgctgacatttcaaccttgtctaggattgatcactgttgagtctagagtctagagctatttgctaaataaatagctcagtaaacaattcaaaacgttcccagcagctggagctagaacactggtttagcactgtggcatgtactaaccagctaactcagactttcccttcccctcttgctgcagtctctcagggtccatgtctatacatccattcctaaaattaattacccaagttcggctctcctacttgagtgaataatccttactctccaaagttaaagtttgaattgttcctctgagagatgctgggataagactctacttagagacttggagttctgttagttcaaagtgatattttgaaaatgaaatatatgaaaatacttcctacacctaattccacacaccccaatttttctttaagatttttattgaattcaaggtgaagatcaaaatcttgaacttattagctttcagagtccatgcactgtccaacatattccttgactttgtttctctctctctctctctctctctctctctctctctctctctctctctctctccctctctctctcacacacacaaacaaacacacaccctcaacttcttgcagttcacttttcaaaaatcaatataaccttcgctccttcatctgagctcccatccctgtcatcatgatctagtccctcagcatcctgtttgccctccatcaccttgactttgatttataatcaaacaggcagtattctaactacccgatggaagatttttcacctttgataacaagcaggccccaagaaagtaggcaccatgttgtgcttgcttgatgctgaaattcaagtgctcagcacacccttgcttgttgtgtgtgtacctgtgtgtgtcatgtcggtgcatatgcctatcgaggcttggggtgtggcatcagatgtattcctcagtagctccttcgccttatgtttagagactggatctccctctgatcctagagctcacagatgggctctgccttcccagctctgcagtttcagatgcacaatgctgtacctggctctctctcttttttttcttcacacgggtgcttggtatctgaatgcaggttttcatgcttttgtagcaggcactctactaatggaaccatcttgccagcctaatattgtggctaattgtggaagatacccttaatgattctaggggccttcagagatggcttcctggaagagaaagattgacctgggagatgatggagttgcttgttctgtgggtgtttaagagttagctgtctgggggtggggggcgttggtctagatcctattctgagcatgatatttgtgctggatagcttgtgtcaagttaacatacttgacacaagctaatgtcatctgagagagggaacgtcaattaagaaaatacctccacaagatcagactgtagacaggcctgcctgtaatgcattttcttaattagcaattggtggaggaggccccagcccattgtggatattgctatccctgggctgctggtcctgggtactataagaaagcagtctgaacatgccgggagaagtaagccattaagcagcactcctgcatggcctctgcatcagctcctgtggcctgattccaaccctcaataaaggactatgatctggaagtgtaattcaaataaaccctttcctccccaacttgccttttgtttcaacatagaaacagcaaccctaactaagtcaagtcggtaccaagtgtgtgagatattgctgtgacacacctgaccatattgttttggggaggactgtggaaggactttgtatgtttttttgtttttttttcttttggaaaagccattgagtattcaatgagtattggtgagctgttctgtaggagtatggaagagtgttggggcaatgtagaagactggtttgtagactttcagaggaaagtgtaaagattctatcagggtcgtttgttatattgaatgaaagattcagtagttctggttagctggggctgaagaatcagctgtgattaacaagataccagaactactaaagtgaaacctttgctttcctgggatactccatgctggttggttgagaaattagcagggattgcgacgtgatcagcatatatcactggggtgaaatcatctaggaactatttcttgagagcacacagaagctgtgttccagaggtggccaaggttgtaccttgagctggtagctgtacttggtagtgtagaagtcacccaaggtggtacttgttttgaaagcttgaagggctcatggagaacagctgagacttggcactgggagaggccattggcaatggtgcagcctcagtggcagttgaaagccaaggatgcaaggaattatgctgaaaaattgaggcttgggaccacgaagagagcctatgaaaggctatcggtgaaagtacagcccagtcgcagcaaaagaccccagcattttggaagtgccaataccatgtcacgagtaccaagaacagcagcagctgtggagtggagctagccagagccttgaagacaagctgtgtgtgctgcagagagcagagctggagaaatgaccccaaccccttggaagatcccagaagatcgtgattcaatgctagtaattggatgttgagttgtttatacttttggagtttagttttgctttgctttgatttgatagtgactgtatcctagttcttccctctggaacaaagaaagtttttatttttttgttttacaagagcccacagttgagagattttgaactttaaaagatgttgcattttaaaagagataagctattttaaagagactgaaaatttaatgtgttttaatttgtaaagactgggattttaaaattcattcatatatatatatatatttagccagtgtttctttttttttccatttttttattaggcatttagctcatttacatttccaatgctatcccaaaaagtcccccatacccacccacccccactcccctacnnnnnnnnnnnnnnnnnnnnnnnnnnnnnnnnnnnnnnnnnnnnnnnnnnnnnnnnnnnnnnnnnnnnnnnnnnnnnnnnnnnnnnnnnnnnnnnnnnnnnnnnnnnnnnnnnnnnnnnnnnnnnnnnnnnnnnnnnnnnnnnnnnnnnnnnnnnnnnnnnnnnnnnnnnnnnnnnnnnnnnnnnnnnnnnnnnnnnnnnnnnnnnnnnnnnnnnnnnnnnnnnnnnnnnnnnnnnnnnnnnnnnnnnnnnnnnnnnnnnnnnnnnnnnnnnnnnnnnnnnnnnnnnnnnnnnnnnnnnnnnnnnnnnnnnnnnnnnnnnnnnnnnnnnnnnnnnnnnnnnnnnnnnnnnnnnnnnnnnnnnnnnnnnnnnnnnnnnnnnnnnnnnnnnnnnnnnnnnnnnnnnnnnccacccactccccctttttggccctggcattcccctgtactggggcatataaagtttgcgtgtccaatgggcctctctttccagtgatggccgactaggccatcttttgatacatatgcagctagagtcaagagctccggggtactggttagttcataatgttgttccacctataaggttgcagttccctttagctccttgggcactttctctagctcctccattgggagccctgtgatccatccattagttgactgtgagcatccacttctgtgtttgctaggccccggcatagtctcacaagagacagctacatctgggtcctttcgataaaatcttgctagtgtatgcaatggtgtcagcgtttaaaactcattcatatttttaacgtgagatcttagggatgaatgaaaagtaaaggttgtggcttaacagtgatgttttggtgtgtcaggttgacagtgggtcatttgtgttgggtagttttatgtcaacttgatacagtctagtcatctgagaggaggggatatcaattaagaaaatgcttgtataagatgaggctgcaaggcattttctcaattagtgattgatgaaggaagcctagtctacggtaagtggtaccatccttaggctggtggtcttagagtctataagaaagcaggctgtgcaaaccatcaggagcaagccaataagcagcacccctctgttgcctgtgcactagttcttgcctctaggttccagccctgcttgagttcctgttctgactgcattccatgatggactatgatagaactgtaagccaaataaaccctttcctcctcaacttgctttttggtcatggtgtttcatcataacgatagtattctaactaagacaatattccaactggaatcagacaattgtgatttttaaatcactgcttagattcaaggaggtaacaaggtagcattcttatttttttatttagctctttggagaccattgatttttcagcttttggcccccttctctgataatgtttattatctacatttcaaaaactggcccaccattttctctactgtggtgtttcatgtatagaattttggttattaactggtccacagttaggttgaggtagggaaattccagaaacagtcttttcttatttacaattctatatactgttcttttaggtgaccacgatcaaccactgcaaaaatactaaatggaaaattttggaaataaataatattaaaaattatacttgactctgagtaagcatgatgaaacctcacggtcctgttccgtcctgcctagaatgtggattactcctgggtttaaactatccatgttgtataggccacctgcccattagtcccttgacagccgttgtgggtcactgatatcacaaggattgtgttcatgaaacactcgctttacttaatggccccaaagcaccgatgtggtgatgcaggtgactgtgtctctgtagatcattctgcctgttttccattatggttaatttctcactatgcaacttgtaaattaaactatcagatctctataagaataggaacaaacagtgtatgcagaacttcactagtgtctatggatttgcaacgtcctcttcaactatcggagcagactgttgtgatgagtccatgctcccgtttctctaaaattcctttaggggggtggagacgcatttgccatgcgaagttcacaaagggattctgggaagctgaactcttatacaactttttcttctttttttaatattttttattaggtattttcctcatttacatttccaatgctatcccaaaagtcccccatatcccccctcccctacccacccactcccactttttggccctggcgttcccctgtactggggcatataaagtttgcaagtccaatgggcctctttttccagtgatggccgactaggccatcttttgatacatatgcagcttaagctccggggtactggttagttcataatgttgttccacctatagggttgcagttccctttagctccttgggtacttcctctagctcctccattgggagccctgtgatccatccaatagctgactgtgagcatccacttctgtgtttgccaggccccggcatagtctcacaagagacagctatatctgggtcctttcagcaaaatcttgctagtgtatgcaatggtgtcaacgtttggaagctgattatgggatggatccctagatatggcagtctctagatggtccatcctttcgtcacagctccaaactttgtctctgtaactccttccatgggtgttttgttcccaattctaaggaggggcaaagtgttcacattttggtcttcgttcttcttgagtttcatgcatttagcaaattgtatcttatattttgggtatcctaagtttctgggctaatatccacttatcagtgagtacatattgtgtgagttcctttgtgattgggttacctcactcaggatgatgccctccaggtccatccatttgcctaggaatttcataaattcattctttttaatagctgagtagtactccattgtgtaaatgtaccacattttctgtatccattcctctgttgaggggcatctgggttcttcttatacaacttttaattttgcttcagcgatatttacttccccttcagtagttatgctgcctcttttatcactgctgtttcatttgtccagtaaactccccatttcccgtcttcaggtgcatgggctgcctttatctcgggcaattggttccagcagacagactgattagaagacatttccttcccaagctctgtagctcgatattctgttacctttttatcatcagggctatagaattctctctttgctcagcctgaatgcatgcataaataaaaaggctacagcaaagtccctgtcctctgccactggaatcccagctcatctcttttggatgctgtcatagaaattccatttatgtattggtctgagaatttcagaagtgccttgctgtttttttaaaaaagttattctacaatgaatctttaatccatgtgtaagtatgagacgagcctcactatgcccatggaaagattcttgtctttaaagaaaaaaatctccgtgatttctcatttatcttttgaacctcagaattggattaatcgtgatccctgatttgtagcatgctcattgttgtgttatgtggccagagttcatctcacagcattccaaatactatatggtgtgacagtgggatgctgctgcaagtggtgatgggaattgggcaccatgccaagatgttgctattctgaactgtgtggctctgagccttcctatacttgcatcttgctaacatgtgggagaatttctaagagcggcattctgactgttcatgggaaacagcagaccatcttcctaattaattacaccagtgtgtcctcttacctgctaagtgtggaatatgctctggatgcacatattctacagcatatggagccttcttgtttgtgttcacagaatgcgtgtaaaatggtatttttttttctggattttatttttgttttgttattttctttcagacagggcttgctctgtagcttaggctggtcttgaactcattatgtagccagtgttagctttgtagtcctgatccttctccttctatgccctgagtgttagaagtagaggtatgcaccatcacgtttagatccttagtaaatttactgtccatgatgtttcctttgctcagtttctattacaggaagtgaaggtactttcttatcagttagtagaagttctttatatgttatggatatgaacttatagccagtacttgagagttttgactcttgattttgatatggccaaatctattagccacttattttatatagatgtttaatttgtttttgaaatcctttctaccgttatctcagcttttcctttttaattaaatgagattaatagcagccacatgtaaatgtgatggtgtggtaattggtgacttatttgtgtctccttttctttaaataagagatagtaggagctgagtagtcagtccactaactctctccatcagcaacatcactgccagaaagggctgtgggctagtgggtttgtcagagctttccagaaagctgcaccaataagaaggtgggggagcaggaggaggaggaggaggaggaggnnnnnnnnnnnnnnnnnnnnnnnnnnnnnnnnnnnnnnnnnnnnnnnnnnnnnnnnnnnnntttaaaagaatttgacacagtgacagcatctatgatctgcacagtggtattgccaaagggctctctggttccttggctaacatctctggactttaaaatcctctcctgtcaggtgagtctaagtggggtgttgctataacacatttccctgtcttcaagtgtttgggcatctttttggatgcctcttgccattaagttgcaaaactttctaggtagagagctctcctcatgaagatgcttgtagacagcagcgtccttcctgggcttgcacctgtgtagctgggatatggttaggctcacttggggctccacagagcagctggcccatgttctgctagctgctggtgctatcggatttccaggaagcttctagaacacccaaaaagtctggagcagctcgacttccctgattagtgactgaagtaatattctaaatggggcacaaatgccagagaattaaaaatacttcttgtttttgaataagaagctgccatgttcccaggacagcagggctatatctggaggagcagctgccagctgcctcatgggctcccctagccagctgatgtgccaagggctccccattcttcagctccaccccaccccccaaaaaaggtctctccagacaaaggctgggagggggggggaagctgccttctggagcttccccttctctgcatttccaccttctagctcagagcctggaatggcgctcctgcagtctgtcacttgggaaatgagtgtctccagttgcccttaaggttccaggctggactggttctagcatgcttgagcagtgggttagaaggagggcttggtgaaacgagtatgtgtagttggaggacagccatccattgttctccaggatgagttaggggttgcaccaaggcctgtggtaccttgtttgctgtttgaagccactgaaaactgaactttggtctctttgcctggctttgtcctatttgtgtttgtcacagtagacatgtgggtgtgttgtgtgctcagtgaatatttactaagtaaataagtaaaccagtgaaagagggacaagcacggccctcgtggtggctttcaaatgcagcatttgtatctgtgtactaaaaatttttaattactctctctctttttaaaggtgtgcatagctcaacaaagtccctttaaataaaagatcacagcaataaaagtggctccttcttgactgagtctggggggccataaggagagagagagatcgtttatactcctcccagggccagtaactaccaggataattttgtgaaaaggccaggcggttaaactaggattttgctgaggcttgggaaactgaaacacaggaggatacaagtgcaaaaaaaaaaaatctattaaattttacatctgtgagcactggttctaaaactttaaaaaagaggtgtagcctgcattatatagaattgtgtaattcagtcagtcaacttctttggaactagtcactgttagaacgtgggactgatcaaggctggcatcgctgtattgcctttcatctcttattttctgtaacatcttagtgttttgatggacttgtatctattccatccatgacagggtaaaccctggccctttgaatattaccttgcatggaaatagggtctttgcagctgtaggcaagattccagtgaccccaatcccatctaacaagaagaagctcccagagtagagataccctgaaagagagtcccacgggagctgatacattttaacaatggagctaacctaggcacatcctgcaaatgctaagggatagttcagtaactgatggctggtatgctgtgtggcagctacaggtaccacagaaatagactgtccttgtagcaggtgtcatcctctgcaacaccaaatttctttacggaatgtttcataaacttggatgtacaagaaagtccataaagaagggcatttttttcctgcttctatgtcctgccaatcactaatctgttcatcttgatagctttatcattttagactgctgtatgactgtaagtgaccaggctaggtggatgactcaagtcaataaagtgccttctgcaagaacaaacctgaggactccatgcatagcaccatgtgagtgtgagacattgtggagatcagtggccttagcaatgtgggaggatggtgacagggatgtcccagagcttgcagtctggacaactggtaaaagaggaactcaggagggaaccctgtctccaaaagtaataaactagagtaagcaaggaagatactttgtgtagacctccagtcttcccatatgtgtgttctcatatatacttacatgtactcatgaaaagaaaccctcacacataaactcaacacacgtcagaatcaaaacagcaaaccatacaagcagacaagactagaaacaagaggccatggatttgaaagaaccaagaagggtaaatgggaggatatggagggagggacaggaaggtggaaatgatgtgaccatgttataatcgcaaaacaaaagaaataaaaaaatattggcttccttcagaataatgctttttaaatgtatccaaattgatgcatgtagcaaatttcattccttttaaaactgaacctcaccaaattgagccgagttaatatctacattcacctgttagggtataatttcagtcgttttccattgcatagattgccagtagtaccactaaaatcaattttttgacatatatttttagtgaaattttaattgtgatatgttttggttttcttttcatatagctagcttcctgtggactttctttttgctctatggactatgtataaatatatttttcaagttttaaagaattttcttgttatatttatattactgaattctacttagagtcagtttcattagataatatactttgtatgattcaatttttatatttgttagtatttgtgttatcgtatgggctagagtggagatttcttggaaaactttcccatatgttcttgggaaagttctgctttactgggtaataatgatattctggcgttgttatgcaaagtattatacacaggtcaataaggtctagtatgttgataaaaatgtttttcatagcaatgaggaaaaaaacctacaaaattagtattagaattctttaggggaacagaattggtaaaattcatgtatgcaccataaaataagatttattccattggcttacacagaaggggctagatagtcttggagaggatgcctgaacaccagagaggcacataatctgctttgttcacgaggccggatgcttcagcagcctcaaccaagtacagtaaatgaggaagatttctggggagtccctggtactccgtccttgtgggagagttgcagaaacctgtctgctgacaccagagtgagagatgctctcagtcacaatgaagaaacaagagcagccaggcaacccgcctccggattttgtatccagacctcagttagaaggtactattccctctgaggaaccacccccgaccaggacaaattctccctggaaaccccttcatagacctacctagaggtacgccttctagatgtttccagatcgatccggtcaagctgacgctttataacactgaaagcacacagagcatgtctaatttctgttcttccgggttaggttcagaccacaggttctgcttgttgcctgtgggctgatttctatggccattcaaatttccagggcagccacactattcatatttttctcctaggtgtgccacccagtggccagtctggaacctgatggccatctgcctttaaattcagtcttaggcttctttatgcagattaggatcctattccccagtgagtaaacacaggggtccatgaattaatccctctttggagctgtttttgaggccctccttctctgctgtaccccacttaaccacctgggctgttttctgggacccaccaggtagctagctatggtgtttgattgattgattgattgattgattgattggtgtttgttccacacctttgaggcttcacctgccttcagggaccaaagggcgtgataaacttagagaaggtttaatgtcatctccctttccctgcatctgcctgtcactgtccttttgcattgtgtgtgtagctgtcccatgcatccccatcaggtttaaaggctacattcaggcagaaagtctgggtggggtgttaatacttccttatcccctgccagtgggtcctaaccagacatgcacaccttagtcagctctagcacatccccccttgaacactggacatgggcataggtttcacaacccttccccacttctaggtctggagaccctttagcaagatactcacagcggaagtgtccttggatactaagggcttgctaagagtaggggagaaaagacgtcctgctgctcagtagcttgggaccctccatgcattaggtactttttattgttcaatcctgaaaccagtcagatgggtggtcagcccgtcaaaattccataactggtgccacgctaccccaaaccataatattcctgagctacccacctgcacttttaccctaaaggccatttcaattttctgttgagtgtggctttgttttccataggggtaggggttgcatttctggaaaattactgttaacgtaaaaatccacaagtctaatatgaacacaaatgaaaaggatgaaagagataaacatacacctttaaaaatacttttctaggaacctcatgaagccaggcagggtctatggagggtgattttacatttgcagttgtttgaggcaggtctgggctagaagaaatgctaaaaaaaaaacacaagcccagtgatgtttgtactcaatatgttgtcttctccttactacacctcacaccagatgctttttattgcttgtgtaactcttagctgaggttaaaagcagggcattctggtttgggaaaggctggtctttaaaacagcgagtcaccttatctatttctatcagggaagctggagcccagattctaattggtttgtgagccagagtgtgcattgggatgacgggggattgctgtcattgggtgcagctgggtgctgagcagtcagcatttcatgataagcaggggtgtcttgtgtatgtacctatgtgcacgtgtgctcctgcctgtgtataagggtccctggtgctcctaaaggatggacctgtttcctctgcttcctctttccactgtttcctagcacagacagccctttgtatctgtagagtctgcatctttacactgaaccagctgcagatgtgaaatgaaccgaggtctactatggcccagtctgcactgcacacatacagatgtattcctgttgtcaatatctcccatacaataccagcacgactatttacattgtacttgcgttgtttgagctgttatagataatctgcagatgatctaaggtatacagggggatatatttgggatttatgcaaatcctatatcattttctatttgggggcagggcatctcaggaacagacccctgcagataccgagggaatactgtatcttctgcagctgtttatgtctacaactgtctctgcgtcggtggctggagctgtgtttgcacctcacccttgaagtcatgtatatggtttgtggacggggatgatcgatgcacagagcatgatgacaattggctgccttttcagcaatctctgtcttgactctgcctgagtccacatcagccttcacccccagaaaccatcctgactcacctccgctggttcacacatgccaggactttgtgatccttttggcagcccctgcaggccaggctaccagactgtgggtcactaaacagcatctgtaatcccagatggagggtctgtttctagagtagcaagagctatttaggggcattgggccaaatctcttttctgggtctggattgctcatttttctttgctactctttggtgcgcttgaaaaattgaagcagcttgaagcccctggcctgggacatgtttgattagctggctggtggtggaagatggctcagcagggtgagagtccaacaaggttaaaagttgcagtgttcatctctgtggcaggggcccctgctatgtgtttgaactggtcactcagtggggtagctgcatgatgggactccatacttgacttctgtggtgtgctaccatgtaagcagacatcatctataaatcatcattcacaataaaaggctctgctggttttgatgctgggccaaggttcaggacttttcaagccacaattcttttcttcatatgatgaatacatgataataattttgctttgaggttttaccatgatggttaagtaggagaatgtatatgaaaatgattagctggatggaataaatgctaagcatatctgaacagtgtctctcttcatcgtttctttctcctgctgttaattgtgagttcctggtaaaaagcttaatttcttggaattttcccccatgcaataaatagaaatgaactgtatattctcatttgcagatttatcagaagttaaaatgggacaatgtgaagtcctgggaccactaggttgccactggaaattactgattattaattgctagtagtaaatcattaacaatatcctccttgaccctataacacatccatactttaaaaaattttgctattaacaacacacaaagaaaggccactcttctgcagtgtcttactcaagggaggctgtgtcctgaaactcactataccatcacccagagagttccagagctgagctgcagaactgagttcttgtccccactgtgtgtctgctaaccatgctcagttagccctgctccaaacctttataacacacaccactgtctgctgtcccatcccacccctactttctcctgctatagctgttgccccaggtccagaacctccatgccccaatctcccaagcctgattctttcctcttccctttggtattttgggttgaacctggttgctttataggatagcctgctaagctcaatcccttcccagaaggcctctttcttaatccatatgattgcctacaaaacatttctttccactctttctacattattccaactctttctatgtttagtttctagatctttctataccttgtcatctgtttctgttagcatctctccatcttggaaactagttctctctcctttctttaccacccaatgaacaccctggctcactctttttctttcacctcaaatctaacttgtgtttactgactttatagtgtagtttctcatttagtttatcttctaatctataaattatatttctccagtacctgagccttctactcctgtgttagagtcatactctataatcataccagcaaccacagcatgtcccgattttgtaaaacttaccaggacagcctccagcactcatagtacctccaatgaacattgttctgtcagagtaagactggaatcagattctcatttttacaaaggctttgtcttcatatgttcctactaaaacttcacagtgttggtccataataatctctgctttacctacatagttctcttgacccattttctttgtgatattttccaggtagtactgaacttggccatcttcctttgcacagattatctgagcattgctgaggaaaatcacaaactagaatgctggcttcactttgcattgtttcttataaactgtggtttccacttaagtccctaacaccctattctatacatcatgtgccctccaactctcaatgttcttgctgctatgaagcagtgcctgtcagaatgagataaagagatggcttagtggttaagagaacttccagaggacccgtgtttgattcccagcacccacgtgacagtcctcaatcagttgtgactctggttccagtgggttagatccttcttgattctttaggtcccaggcacatatgtagttcatggacatgcaaacacggaaaacatccatactcataagacaaacaaaatactggagagacacctaaaggaaagaaagagttgttttgtccaccatggtggggaaatcatagcagagttcacagtggctgggatgtgtggcagagtctcctcacatctcgatgaatcaggaaatagaatgctctagccagaattggaaatagtaaaacctccaaggcccgctcccttaggagccctaggtcccctgtcccagcggttccttaaccttttaaaaacaacattaccaacggtggaccagtcattcaaatacaggagcctgtcagggacattttacatccaattcacaaaagcctcctcttttgtctgcagtgatatcagctcgtttacatcagtgctcgttggcccccacctgaccttgtctcatctgaggaaacacccctccctgctatagccatttccacggagagaggtctcagctcaccccatttgcattcgaacaccttgtgttgctctttctcacgcctcttctacattagtcgagtttctgcaactacaatgaagtactggacacaggccattatgaaaaaaaaatgagacgtttattcagctcacagtttggaaacaggaaagactcatggctctgttgcttggcctctgaagaggctggtggatgttagcaatgccatggaggtaatgtgtgtggaatacattgtcacgtctccaactagaagaaagagagtgatgactcagatttgctccttttctaacagtcctctccagagagtcaaactagcaagaaatcacatgtgacccaccacatgtcccagtgacctggtcacctctctctaggccctacctccctgactttaaaaacacacacacacacacacacacacacacacacacacacacacacacttcctaatagtaatacccaggagtctggggggggggcacttaacatctaaactgtatagtcactgaaatcaccagaaattagcctgtccttttctgttcacagaatcttccatcttagcaaagaaaggcaggttctcatcttgttagcacccagctaaagactctgttctttggcctatttttctacctactataatttggctgatttcatccttgcactcctgaaaggagtttaccaagaccagctgttcctacctttcgggtatgctgttatttgtcatctttgtcctttttggacaattcatccatgctggcaaccacctccttgctgccacctcttcttttctcctctgtgttatcatcataccagtgatgtcccctaatgcaaggccggttttctcagtcttcttcacagactcacatatcccatggaactacaattgtccccattccccaaggggagtccatactcccccttttgtttcgcttcatttctcttggcctcatacagaccaaaggtttcaggcatttgctaaactactcacaaagagaatgttacttctacactttccctctgagccttaagtctgcttcactgtcacacataaaccgcagccttgacatatccaaaacagcattctccaacccggctttcccagcctctcaggagttcccacttgcccgggcacaaggcagaaatcatccgtaatcttgatagtgtctgtacattctatattccgttcagtggatgcacccatgtggtaaggagcgagactcagatagggggtatcagaacatctcccctcactgacagcaatgaaaggattcctattagccttctacacttgcccctaaccccagtgggccataggaaggaacagagtttctaaagaggcggggctatgtgataaatcttgttataaggtccagcgttcaccctgagaacaaggtctgcccatgccattgttgatttgagaggcaggcatcaactagggacatagagagcttgcaatttttaataactcaagtgactttaaagttatgggtgtcattctgggaccagagcatagtacatgaaggcaaagacttttctgttttacttctttggggttcatattgctcaatagagcagttgtaataaacttgactccattatttgggagttttcaaaggtatttgattaaactgtaaataaaactggaacttgcatggggctcacctcttttccctctgagggctttgtctcttcctgtagtacttgactcattgtaactctgggacctttgcaagtaatctgattcatagtgcggttttgactttctttctcattttaaaaagtctacctcggtagaaaagccaattccagagcatgattcgacttttagcacctgtcttctgattactctttttggactcaatatttcattatttactgtcttcttttaatgactctgaaggcagatgctgaaggcagccttccgttgctatgacagaagatctgagatcatcagcttgtaagagaaaagctttatcttgggttatggtttgagagtcttgagcctgtggtttgggcttgttgcagcattgacattacagggagtgtgtagcagaaagtctggccatgtcatggcagctgggaagcaaacagagaaagagaagggaggccggactcttcacagcttctccatggttatgtctcagtggccaagcttccttctgggctcccctctttaaaaaaagtccttctaattctggcagatccatgcatgggctagggactaagcctttatcaacaggcttttgtcacacttgtgcccaaactcttaagaactgatggtgactgcttttctccctgagcctggcataagctctggcatatgttagagcataacagacacttgttaaatgtaagaataaaattcattttacttactgtcctataaaaaatttaaagggttactatttcctttgggggatttaggtgctgagtagaagaagaagcagtagctaccgagaagataggatgcttgctacagtgtcatttacctgcatgggttccttctaagatattgtgattggcaagctcaggtgcttttgaaacatttgtgaaagtaagtgttttcataggtttgagatgttataatgaaataaccgggactaagttaacttgaaaacaacagatatttattttcacagttcatatcatagtacttgacaaattttaatatctgaggaaggtcagtggttcacagatggtcatctttttgttgtgttcctatgtagatgaagagacaaaggagtgagtgggggcttgttttgtaagagcactaatttcatcatgacgtttcaccctcatgaatctaccatgtcttaaaggtatcaccaccttgagagttgggatttccaattataaatgggatcacatgtggatattctagtcccactagtgacgaagaaagtgttttctgtcttctttctgtagatcaccctatattatataatttttattactaatgtgcgtacatacatgggtaggtatgtatatgtgtatgtccagctgcatgtgtgtttgcatatacatggacacccaaggccaacctcagctgtcattccttctcaggctctgtcacctgatcctgtgagatgggggtcttatattaagactgggagctcagtggtcatgctaggctggctgggcagtgagtctcaagcatcagcctatctctgtcttccctgtgctgggattataattgctttacattgctggctgttagacctcaaccgctgacctgtttgcccaaatagcactttacggaatgagccatctccccagcactatattaaatgattttttttttctggtttctatagcacttaactatcttgggaccttgttgattaggaaggggctttgagcagacattgcatatgggagctaatcagaagcccacagccacagcccagctatctctcttatttttgttagtagtcaacatactgttcctctgccccatttctttcagagctatatacaaccccaacaacccctgactccccagagcgtactagaattattcattgcaactctctctctctttctctctttctctctctctctctctctctctctctctctctctcacacacacgtgtgtgtgtatgtgtgtgtgtgtatatatatgtgtatatatatatatatatgtatatatatatatatatatatatatatatatatatatatatatatatatatatatataatttattagagtgatttacaggttgtggtccagctagtccagtgatggctgtctattaatgaaatacccaagaacccagtagttgttcagaccatgaggcctgatgtctcagctcatctccagtatatgccagaatcctgaagaagtaggctctaatgccagttaaggaatggacttacaagagtgagtggacaaagagctaaagcttcctcctttcctgtgctttatataggctgtcacctgaaggtgtggcccagattaaaggtggatcttcttatctccagagatctggattaaaggttgttggtcttcccatttcagattgttttctactactaataaaatccctcacagatatatctaatcccttgggttatagctaattccagaggtagtgaacttagaaaccaagaataattgttgcagtggcttctttggattggcttactttggtctgcaactttcttccccagaaagcacagtgaggagaagttcaccttttcctcccatgccttctgccccctgggtcacactgggttttcaccatgcctgactctctttcacacacacacacacacacacacacacacacacacacacacaccaccaccaccaccaccaccaccatcgtcatcatcatctattatatcacacacccactcacccattcatgcttaattgcattcatgcaacactacctatgtctgtccctggctttgcactaaaggaagggaatacaaagtcaaatatagcttcctctgccctccagcactgggcatagcagtcagtgactgtatttcagtatggcactcccaaatcgattagaggtgggtgagggtcaggagaagagatgccactcaaactgagttttgaagacaggggacacattcccactattaattcctttgtccctagtgccctctattgtttcttaagctcttactttgtgacaacctctgttgtaggcacaatggttttgtggtatgtgaatccaacatatctccttccttatggcattttcagtgagtgcagggagtagacattcaacaaaccaaaacccagccacaccagggagtcacaagttcaggtgcctgtgaggctgaagatgtgcaaccatgctgttcagggtcctgatccagatgcacacatctagttggggaaggcttctgagggcatggcacttactcttgggtctgaagtgtgacaatggtgaagtcagtgattggggatgagcatcctaaattcagcaaaacacagggtgagtggaaaggcaggtaggcagcggatgggtgaggaccaggttgaaaacagggacctgaggctgagtgagggagggagagcccctcccagtcaaagttctgcctagaaagacagcatgagctgagaggcaggccagctggggcaactctgaaagctgagtgcccaggggctgttctcaccagcatctatgatgttcctacagtgcctttccctccatactggtttcttatgtactaggcttatgggagcagggcaagtagcttgggcagaggttctcaggcatcagcacccctagccaggaaatacagctggggaatgcgggtgttccttttaaagtacttaacaggaggagaggcaaggtatggattctatgcagttacctgacaaaaatgcagactgtagatgtgtctgcttttgcagacaaaagctctccaagagaaggaagcttttctgtgttgtcctttgctgtatcttcagtgcccggaacatttctttgcacccacccagcaactacacatgcttgtttaataaatgaactgtgaatatattttagacatagattctgtgcagactaagctgagtcaggcagcgggacaaggtccaaaggccactggccactctgccttcctcctctctgtgggcctggctgatgcgcctttgcttgctgagacctttcccacagcatggctggcagaagggacaggctgcagccaggatttggcagcaactccaggcttctccaagctgctgtgtttatccagttgttatgtgaggctcttcccatctggcccccctgccagggctgtctctgcagctaatgctagtgctccaacagaatgcacagacaaatgtctttgacaactacctgtgttattattatgattttctcttggactgactgctttggtgcctacctaaggctctcccagggcatctcatttggaaatgttctggattggctttctgcaggcagctgcctttaagacaaatgtggttggtctgagacaactacattacctttcaggcagtcctccattaaatttgggctgcctcaaatctaggagagttgctactacagactctccttagcttccatttatgtacctactcagtgtatctgtaagttaaacacacctgggaggcatccaaacttttctcctagtcctgcttagcgtttcagagttttattaaatgaatgatttattgagcaccttaaatgcaatagacattgtgcccgtacttagcctccaacatcttgttttatttctaccgcatccctgtgaggagggtattattgtatttcttcttcaagagagtaaattaatgctttgagagaggaaactacctaattaaaacttgtcagggtttgcattaggaaacccagccttgctccttccttctggtgagcttgaccttgggcacagttgaaggctgccaatactagctggtctttttctttcacctgggagctaggcagccagatagaggagttcgagttggcattgcatctggttataggatttctccaggtatagacaagggtttgaaagagaggaatcaaacaggtagagttgccatggaggagatagaccccaggccatgcctccgttggtggcaaggtgtggtattccagggtctcctcagggactgagcagcagctctaggtccttaaatgttaactctatgctaacagtggtccctacaaggaagtcctgcctctaactatcaagcttgatgtaccatttgataagtcctgcagcctgcctctgaaggccactttctttgagttagatgcatagtggatccatgtgttttatagtttaagtttagatctttctctgattcacaggtgaaagagactgaggcaggtagcgacctagtatggatacttgcatctgtcgaagagttatgtgttagaagtgccgtggccattcaatcagaaagcccaagtttaaacatgagctctcatgcttgcttaggcctgagcatgtcacaaagggcctctgactctcactttcttgctctgcaaatcgaagtaattgtgtttgttgctacaagagtttatgtttgtggcttttacctgggggtaattatatctccaaggcagtgtgtggccaatgtcttaaggcattagtgacagagtcttaattagtgatgctattaactgttcaacagggcagaggtcagctgctccattatccaacctgaagtgtcagtagtgcttgattgagaaaccttcatataaatgatgaagtatcatttagaacttagcacacaagaggatgttcattgagaatatttgcattagacttagcattagagctagaaggtgccttgctgggccttgcccaggatttccttactccgtgtctcagtcctagaagctgggatgggaccaggaatgtgcctgtgagcatttgtcagggttctgatcccatgttgctggggaatgccctttgtggtcctcattctcactgcagcatgttggggcctcagggaacttcgagagtctgtctggtgttgaaatttgtcctttaaattttatctatctatctatctatctatctatctatctatctatctatctatctatctatctatctttctatctatcatctatttgtgatatgttagtccaggtgtggcatatgacatggaatgcatctagaggttagaggataacttgtgagaggtgtcactctccttccactgtgtgggtcctagagatcaaacttggatcaccggggttagtagcaagtgtctttaccaatgagctttctctctatcactgaaatttcttcccacatgctggcctattctaggatttggtcaagaccaaggtcccctttgcgtttgtattctatagcatcagcatcttattatccttttaagatgtgtaacctggacatagcctttctttactgtctgtagcttctggggagggctctaaagtcagaaagatctcttgttttaggacccttgtcacatgggctcttgctttgcctccaggtagctgatctggtaaataggtactggagctcagtgaagctggggtttggtgtgatatttccataggaagtgtaataaatcttgctccatactgattgtctttcatgaagccatgaggtgggtgttcaggggcaaaggacatatatagaagcctcgtgaggtcagtgatattacaggaaaggagaactcagtggggggaagtggtgagaccagaaaatgtcagaacctctctttgtggcttagagagagatggtaaggctgataggctatggaggggtgaaggggacatattcaggaagtattcctggagtatcgggagcagagtggtgtgtgcaggagacctgtgatatctgcgcctcatggagatagaggagagaaggatctgaagtgggcatgcgtgagctgcggtgtcagtgagagaacagtaggatactgctcagaaaaggagggcaggaagcaactgtttttagtgctttctaagttggaaacctaggggagtgtcttgatcccctttctccaccaagacttgtaggggagtcccttgagctccgaggcatggttttgagaagtagctagagctgccttagaaagtctgggcaaccttcttggtctggccaagtcccttaaaccatccacagggtctagagaggctcattcttgcccagctgtcctgaatgtcccacactagcccggcagaggatggtgttttcagctcatgtcatatccacccctgaggccttggccctcttttctttttctttttctttttctttttttttttaaagatttatttatttttattatatataagtacactgtagctgtcttcagacactccagaagagggagtcagatctcattaccgatggttgtgagccaccatgtggttgctgggatttgnnnnnnnnnnnnnnnnnnnnccctccctccctccctccctccctgtttaatctagtcctatccctggcccagggatgacagcatacatgggcaggtgaggcagagtctcaacagaggttgttctacaagctatgccccacatgcccctaccccaggggagacctatatgcagatcatggccagtgcctgtctgctcctgcctgtccttgttctgggatccctccataagtcccagtagtgcattttctcctggtgtctagaaatgtgtattgtttccaggctccagcttggctaattggactgacaattgaggggctcaggaggtgtttgtaaagtgttcccagggagtcataaaagtgccaggttgtctttttttaatgatggttcttaaggtcctgatttagcagattcttgtgtttcattgtttctgcccataggttattcttgttgaggtacttggaccccctctcctttctagtaatgacaattgtaggcttggattttttttttttctaaatgtacttactatatttagggttcttgaatgcttcaatgtcttttctagctcatctttttactgaccagaggtagggaaaagacggtttataggaagactgtggacctgtttagaagtagctctttaggggcaattccattcttcactgtcaggataccagcagtccagtccaatagcgaacaccaaacatgagtcagtagccgtggcttgttctagcagaaacttcacagttctggcgaatcagcaccagtcaccggaagaggcaagaattagccagaataccatgaggtttctctttttcttttcttttttctttgttgttgttgttgttttgttttgtttagcacatttctctctatgaagtgaagaacgtgaagaccagcaaagaccagcaaagtgttgcacagccagggaagaccagtgaagcactgcacagctagtaaagacagcgatgtgtttgttgcactgcatagcaatgcaagagcgtcccttcactgtctgtggggttctacttatattctttccaaacatcatgcaccctctcaagtgtctgttttccacaaaacatcacatgccctctcacatgtctgtttcagcaaaccatcctctcataagacaacttccagataaacatcacgtgacacaaacatcttaagaaaccagaaatgtccccttcaggcaactattatggagacatgttttttttttttttcattcattaattagttcatttactttgcatcccaatcgcagctttctctccttcctctcctcccagtccctccctctccccttctctctccccattcaatcccccttcctcccctccacacacacagagaaggggaggcctcctgtggatagcaacctgccttagcaaattggcatatcaagttgcagtaggattaggcacatctccttttttaaaatttattttattttattttttttattaggtattttcctcgtttacatttccaatgctattccaaaagtcccccatacctcccccccaatcccctacccacccacatctcnnnnnnnnnnnnnnnnnnnnacataaacatcacgtgacacaaacatcttaagaaaccagaaatgtccacttcaggcaactattatggagaaatggtttttttttttttttcattcattaattagttcatttactttgcatcccaatcacagctttctctccttcctctcctcccagtccctccctctccccttctctctccccattcaatcccccttcctcccctccacacacacagagaaggggaggcctcctgtggatagcaacctgccttagcaaattggcatatcaagttgcagtaggattaggcacatctccttttgaggcctgacaaggcaacccagttaggggaaaggaattcaaaggcaggcaacagagtcagagacagcccctgctccagttgttaggggacccacatggagaccaagttgaacatacacatatgtaacagacaagtctgttacatatgtgtatggggcctaggcccatctcatgtatattctctggttagtatttcagtctctatgagacggtatgagcccaggttagatgattctataggatttcttgtgtttttgacttctctgcctccttcagtctttcttccccttcttccacaggattccctaagctccgcctaatgtttgggtctctgcatctgtttccatcatctgctgagtgaagcctttcaaaggacagttatgctaggcttttatctataagcataacagagtaccaacagtgtcagggctctttctcatagggtgcgcctcaagttgagccagtcattggttggccatttcttcactctctgctcccccaatatctgttctgcctttatccctgaatatcttacaggtaggacaaattttgggtctaaggttttgagaggttggtgtccccctctttccattggaagtattgcctggttacaggaggtggtcattttcaggttgcatagcgcctgttgctaggagtcttgcccagggttaccttcatagatttctgggatttttgccttgttctaggtttctggcttgtgccagagatgcttcccccatttcagttctctctccctctgtccttcacttgatccctcctcttttcctcctctccctcccgttagttccctccccccatctacctctgatatctattctatttccctgtctgagtgagattcaagcatcctcccccaggccctccttgttacttagcttctttaggtctatggattgtagtatggctatcctgtactttatggttaatgtccacttataagtgagtacctaccttgggtgtctttccatgtctggattacctcactcaggatgatattttgtagttctatccatttaccccccttacctgaagaatagaaaaagaaaatgtgttacatttacataatggaatactacttagctattaaaaacaaggacatcatgaaatttgcagacaaatggatggaactatacagaagtgttaagagaccctggcagagtagagacaatgtcacttgttgaggggctggtacaagccaggcacagtgtcagccactgttaaacattctttcctgtgttcccaaaacatgtgacatggaattgtctttgttgtgcactaagtagacaccaaggctcagaaatgtctcagcttgtccctgattccactgttgctggagcaggcctcagtcacccccattgtaacaccagccagcatccttagtgattgcctaacagtgtacacagagggttgcctttgacccacagcagcactgagagtcgtcctcttaaagatgaatcagacctgcttaaaatattccaatgattttgttctcagattgaactctgaagtccttaaggtatagagcatgatgtcttagtgtaggtggtgacactacagatggtttctaaggcaagacaattaacatatccataatctcacatagctgcccatttatcacctctaaacccccatgaaaaggcgacctcacctttattttccttttctttcttaaatcttctacagtcacacacacacacacacacacacacacacacacacacacacctctgaatatatttagctccaatatcctctttagtgccctttcactctgccaaagcccttctttcctgcctttctgtgtgtttgtgagctactctgtctaattagagttgcctgcataggcagaagtggaaggatatttatttgagcaaagggtaacttaccactgagggctgtgaatccccctcccccagcaaccattaattgctaatagttcctcagggaggggcggtgtcaggagtccttgtctatccatgatggattattgacaggaaagtcttgtacaagtttgtgccgggaaactccacctgctctgagttctgagagctgcagccatgctgtgttcagaatacagcatttctctgcaccatccctatccaccaggtttttatattcttgccacaactttttccaaacatcccctggtctctggaagggtgatataaatgttctgcttcggactgcacactcagcagttgctgcttctcctcacgttgaccctttatgagtcaatgcattcatcactctatactgcaaatagaagcttccttaaccaagggtgaaatgagcaccaatttatgagttagttattagtgtaaacatttagaaggcaatttgacaacatatctgcttagcaaaacatgactggtgggttttcctcaaaacttccaatcttcctagacgtgggcttttgaccacatttagtgcagattataatcttcctccagtgaaatgggcttcatttccagtcaatagctggctgtcctcttagcaggcatgtccttgttgtaccaataggcagatcttgcctgctggctaagtatcataggatgcaggacccatcgctagataagaaaactttcctattagcctgaacagtaccttctatcactgaaagatttgccagtaggaggaagcttccagatgactttcagctttgttcctctatacttggaaagtgacgtatatgttttcttcagcaatagggtctagttctggtccactacagagatcaatgacaacagtagcctacagtgtttgagggactcccagcctccatggctggtagtgtagagcatcttccaccttggttttgggattttctatggctcttgaggccagcattatacacccacacagaacttccattctctatcattttggctacatggctttccatcttacctctttggcaacctctggagatccttgtggttttgtttttaaacaaacgaagaaacaaacaccccctgcacacacacacacacacacacacacacacacacacacctcttttaaagctatacctactcctctgacccttattcttccttttttcagtttgttccaatttatgtgttaattgggcagtttattaactgtttcctcaacactagtctatctatatggtttgcccctgttgtcctcacaatctgacaacaatacctgcatgcagtagaaagtctaccttggaaagaaggacttgaagacatacaaggatcaaaggatgggaaaatgaaagcatgaaaaaggaaagggaaggccagatcattttggtaaaacttctaagtgtgagcatccaggagtggagcaccagcctccagacagcctggagcaggaaggcagagctggaagagctttggcaccacctgaagtaggccaacatgaagctcttggccaagcttcctagcagcctctgggctgtaatcaaaagctgaggggcaaggcagcctctgtgaagttagcgtccatgcctccagctggttccagattcttcttcaaaggctaattcacaggggctttgccctggagtggctgcagttcatgtccttcacttgtgcatttccgggcacaaaatagaacaaagcgaaacagaccttgactttgtagcttcatgtccagctcaaagtatgagcttgaggaagctggtcagacctgccaaggtgggggcaggtaccctgttcacagttgactgatggtagctcatgacttatagagactagcctagtatgtggagcctgctaactagttaccagttttctgtactcatgggcttccatccccagtggcccaccaagactgacccttaccttctacctggttctacggctttagtggaggctgggagctttcacttgaagcttctcaagctatagctcatgtggaggaagtaaagagatcactgtttttctgggtcccacagtggctagaaccaaacaagtattcatatgatcatcctttcttgggttctcactgaagtagattcacatcttccagagcaggaaagtcatcaagccccctgcttgtcttagttacttttccattgctatgatacaataccttgacaaaagccactgaggaaggaagagtttattttggcttacagctgattatagtccaccagtgcagagaaaacacagagaatggaacttgtgacatgtttatactgcagtcaaagtccagaagtagggagcagtgaatgcttttcctaagttcactttctcctttatgtagcctgagatcttagcctagggaatggtgcccctgatagtgggtcagcctgagatcttagcctagggaatggtgcccctgatagtgggtcagcctgagatcttagcctagggaatggtgccactggtagtgggtcagcctgagatcttagcctagggaatggtgccactggtagtgagtgagtctcttcatttcagttaacctaattaatacatttcctcacaggtatgtccatgggctcttctactgggtgattttagatcttatcatgttgatgattgaaattaataccatataaatttcccagtaagctcctacttctattaagagtcagaggcacaatctggtaccttgacatggcaccccacacccagggttcattacaagggcctcaggagacagattatcttcattctgcttattaacaccctccccactacctcctcaccccaggacttcaggtaggatatggatttactttctggggagatgagggaacagagagatttgtttgctagtctgaaactacctagagctgaccggcaaaggaagacttggttctctccagtgtaatccccagcatggatatacagaagagctttgctgctaagaattcaggatatggaatcaaataagattgtctatgtgacctttgatggttcatttctgagcttagaaactcattttctcatctattctttggaactagaagtttgctaaagctcctaacatgcatatccattatgcacagtaggtttgcaaaaagagaaaaggtcatccaaaggtaattcccctaagcatctactgctaagtttttctatagttaaatgttgagcacctgctatgggcctggtactgttctaggagctgggaacacaggtgagaaagatgaacttgaccctcttcaggtaccatggcttataaagggcaggtgagaatatttacttctgtaagctggtgagaaaattgaattgtcacaagctctaagtgaatcccaggtccagaaggagaaagagcttagtgttttaggaaccaagcagcatttgaagggaaatgaggtcagcatggctttgttctccacctccctcaagcataatgggcagtcatcaaggcttttaagtaggttctgccattatcagatttgtattctgattgaaaagttcattccagctgctgcatggcacctcaaagggagtgacaattgtagaagattgaggaccagcaaggaggccacctaattgttttggcagaaggtaaaggtggcttggaatagggcgctgatagatgggttctctgcgtggtcccctatgcccttctctgacacctgcagacaagcagctgcctgcatcaagggcattggtgcagtggcctctgctgtagatttaattgtgctcctcactgcaggatatgatggagtacaaacctctgtgccccagcatgtgaccttatgaggaaaaggaactttgcagattgtaggtgatagatgatagtaaggtcatcagggtagacctaagtcacttactggtgaggactttgggaactgagactggtgtaacagaagatgatgtgaagacagaggatggtgacatcttcaggtagggaacagaagcctagaatcactctttccaccctgactctcagggcatttggcctcactgactcctagatctctcattttcaccccgagggctgtgaggtcatagttttctattgctttgacctccagtcttaagtactttgtgatagaaatcttggtagaagaacatgtcctcatctcttgtagaagagttgtggagatggattttcaacctcttatcacacacaaccaggtcttgttatcctgatgcatagatggcaaatgttctactcttgtttttatagagcttaggttagggcatggagagccaaaaacacagggttcacatatctcccagggttcacatatctccctctgaccgttcacagtcttggtcctgagctcatcagaaagctctacaattgaccttcatatgtctctagatccctttaagagcccatctctggcagagagtggttgtgcacacctgaactctcagaacttgggagactgaagaagaaaggtcagaagtcacggccagccttgggtacatagtgaattgacaagtactttgggctacatgagactcaatttcataatagaaaagtctcttcacaaggtgccagctcttatcaaagatcttttaagaaattcatatatggagttaaaagaatggggctctgtcattcattggctttttaagacactgatacatgccaaccctgtttatttgtgaactggagctactgctcttgaaaactaatgtcagggtttaggggaggatcacacagctggtggttgtgacctgagatgagtcagagctggccttctgcaatgtgtggttcataggccttccttactgggatgtgttcttctaatttaaacagaagaatcaatgagctggagcaggcaggaccagcccaagaatcatggaatcttggtgattccagcttgcagcagagctctgcaaatgtttggtttcttcttgaacttactgctcaacatatttggaaggccatcttttgaatttaggggctgtctgcctctcctccccagcaatgtgatggatgtaacagtggcttttcctttctgctctcactgtaggaagggcaaacccattaattctggtgtttgcatagttgtattcccctttgccaggccctagtttattatgctttatttatgttgtaccagttgattaaatatgttctttgtggcaagctaccccagtccctttggagaaaatgtttctgagtaaacacagtgacttcaggccttggaaaggacatttttggctctcttggattctgaagccctcagaaagtgaaagataagtgcagtgtccttggatcacaagtgatgttgaacttgaatcccatcaatgtgagtttggggacatttctgtggtcacagcgtagagtgggcagacacttcatggatggtaatgctttgcataaattcccattatgattagaagaaccctgctaccccgtgttgagtttttctgggtctttgaaaatattccatttctgtcttgcctgtcatatcaggaaatttgtgaggcctgaggcaaaatattatgaagagtttgggctacagagatgaggaggtaagctgtccaggctctgccctgggacagccgtgggttcttaggtcattggtggcacatgcaaacttgaggccatctctgggatttcactagagttgaatgattcatgtacgtggagatgtctccataaagttgggaggtggatcagaatctctgctaaggaagagcctccctgatgagccagagtctggaggctgggttagaagcatctttctttgcagaaatccagacatgggcttgataggcatcttatagaattaaaatattgttattattattattattattattaaaattttaacatcccaacctcagagttgcccctctctcctctcttctcagtccctctccccaccaccactctgcccctcctcatcaacttccccatttctcttcagaaaatgtcaggcctcccagggatatcaacttaaacatgacatttcaagttgcagtaagactaggtacttcccctcatattaaggctaggcaaggcaacccagtattaggaaagggtccaatagtgggcaaaagagtcagagacagcccctggtccacctgttaagaacacaacatgaccaagctacgcaactgcaacaactagtgagcttgcatgggactgacctagctctttccatcttatagaattttacatttatttcctatatgacagtgggaatagtctctcttcacctaggatggggccacctctgttcctggtgacagtgattcatcatcggctaacctaggccacactagaatttatgatgtattgatgaagcaccactcggaatcgtgattccttgagatcaaagtgtctaggagaagccagcactgtattcagctaattgctgtagaaatgatcacagtttgatctctgatcattttgtttttacttgaaaacaaaaacaaaaagctactaatcaaattagagaaaaataaatgcatttaagctaataagaaataaaagagagacaagaacagcacaggcatgttcataaaagcaaggtagagaaggcagaggcttctctttgacacatctgccatcaatggtagggacagaagagggcacctgagttccaggcgagcctctctcaggtttctcgtagacagcacagtctttctaaatgacactttttggaagataaacaaatatgttggcattgcctggcaatagaaaaacagtcactggtcttgtttgagcatggtggcctatgaagggctgtgaggagctgtgtgctgggcagttcctcgactctttagaagctttttaccaaagtaatggaccaaaaagctggttcctggaatttgtagtctagggtagccactaaaatcgacctaacttattgttcacagaaagaatagcaagcttctctagattcatccttgattgatcccagtaatggcagcttcctctgctgggtttcataaaaaatctgaaacttatttatttgattttttttcctttatgacgaagagtaagctgaagactttctttgcctagaccataaaaatggatgagaagcaaccccctagtgaggtagaatagagtggagttcagagagctgagaagaaagactgtggaggaatttcttcccctagacctctgcaaggtagactttcttgtaaagatccctcccaatacccagtgcttttattggaataagagaagatgcttcttagaagtgaaatcaggatagtaattgtgggcaaatggaagccatcatatgcagaagatggtgactgcctgaatgtgtagaagaggggagtcaaggatgtctggagggtcactgtttcttcaatattgtacaagctcaccaggtaacgtacaaaaccaacttagtatagggctcttagaatttgcttattctcttgatggatgaggctaccagcttcctccaaaagccgaaacaatgcatccgaggtaacgaggtaaaatctgacactgaataactaaaacctcttcatttgacttccaagggccaattgcaatgtttgctctatcattaaactcagcaatagcgcttggcatttactgtgctctggctgcttgtcagacacagcgctgagctcatcttgaatgtcattccactttgttttcatgctcccccatagcagaggccgggtgagaatctctattcttcaaggaagggaaactgaggcttgacctttgtgtgaatttccctaagttatgtggtttagaaggctaatcattatacagcaaatgttaatttcttccaaatcccaaatgaagagttctctaccacgtgtcactgatatcagaccttgccatgcatttgctttgaccaataccatgtggataaatatgagtgtgtaagttctgagtctcggtcttaagtggtcgacctgctttcccatgctcctccacttctgacaggatgggaagaataagccctgcgtacgtaagactgtccatgtttccctgtaaccttcacatgtgagaatgcatcttcagcattatgctcctccaagagttggcagtcccttgtcacttaacactgactggtacatattgttagtaattgagcttgcattcaaatccagctaacctaagtccagagcctatgtttgatggctcttaaatggatttctttggaagaaataggataaataattgaaaggttatatcatagcactgttttgaatgagaatagccccccacaactcctacatttgaatatttgattccccactggtaaagcttttttgggaaacaatttggagttttgactttgttggaggaggtatgttacagtgtgtgtgacatttcaaaatactcaccccatttcaatttagctgtcttgacccccccagtgtgtggattaagatgtgtgctctctgctctttgtggtaccatggctctgctcagccatcatggactctagtcctctaaaaccataagcacaattaaatgtttaataagttgccatgtttgtggtgttttatcacagcagcagaaaagtaatggatatatagtccctgctacagcctttctttgcacctttgtttatttattcatttaattattagtccctctgtgcgtgtatgtgtgtgtatgtgtgtatatacaagcatgcagtgtcacttgcatggagaagtcagaggacaacttagcaggagtctattctttctttccaccatgtgtattctagggaccaaactcaggttgtcagagttgacattacgtgcctttaactactgcaccacctcactagccctgactgctatagcctttaaactaattttcaaaagtatattatctatctttaagtgtagctcagtccttctctagatctcaattaggtttttattggatttttacaaaatgattagaaaataaaactggaaatggaaatctgattccaatagaaatcctcagaaaataggaaataacgaagggggccattattaacagatttcgaaacacataacccaatagtgattaaatcatggagatgctgattcagtcaggacagagagcagagcaatcaaacacagtctgaaagatattctgtacacacaaggtaagggtgataaagaagggttctgaactgcggatggaggaaacatggaataactgatgttggcagaactcattcattatctgggaaatattacaaaataaacctaggaattgtcttcaggaattaaatatattaaaatcacaggacctagaaaaatggatggtatttttcagctaaccccctaaattttcaaatggtaaaaatactaaggaggtaaatagctacaactttatgagactttctttaagaaggaaaaatataataacaccatgatcgactgaaaggtatttgttgctcaacgacaagttaaaaatatttgccaagccttatccaaatgagtgagacaggcatcagcactctgacttaaaaatagctaaaggtgtgaaggacgctgacatcagaagaaataagtttctgtctcattcctgctgtgtgcctggtcttgggttaacaatattttaacagccaaatagctattggaataatcaaggaatcacaaaatgtaagaaaatcagttgaataattttaacccccacacatttgatgagaaattagaataattctgttaaagttttaataaaagtgatatcttcatataatgctagtgatcatgacagttagaaaaagacatgctgcaaaacatacttaaaattattatatgctcatgctcttgacttagtaacctcccttgagggaattcattctagtcacatggcttagtggttaatgcatggtggtataaggttattattgcagtgccacagcctatgcagagaaattagaaacaacctacatgttcagtataggactgcctaagtaagttatgaaatagtcacacaatagaccattctgtagccagtgaaaatggcccttgtaaagactatgggaaaatatttattctgttatggtaaacataaaatagtaaaactgtatctgtggggtgattataagtacataaaaattaaatattaagtgacctatagcttgtgggccctggaacttagtgattggtgggaaattgtcctcctcctagtggtgagagattgctgttgggattgctaagtgtactagcaggcaatattagaagcagtaacattaagtgtttgaaggtgtgaaagtcctgtagaggacagtaggcccttggcatagtgattggtcacagtgcactataccatcaaaattgtgggccagtaaaaaattagactaggaagtacttgcgtgatgttttagagctgtagtgtgagatgcaaaggaaggggggaatgtagatgctgtagagacagcctccaatactgcgtccttagaaaatagcttcattttgtatgatgtaatctattttaattttaatcctttaacatcacagcttggtcaatcgcataaaccactgaggcaaatatcactttatttttgcatatgtgcacatctgtgtaactactacccagatcaaagtactcatgtatcagcattccagaaggttccattatgttcttgtagttggtttgccagttcttcacatggtaggagccactgtcttttatcccttcttaacataaataggttcacagcgtacatattcttccctgtctgactttcgagattttcctttgttgctgtcgctgtgagaccttctctggtcctttcttgtcaggtagctttcaattgaaagaacacagtgcactttatccacccattacctgattgatggatgtttcgactttgctgttaatcttttccctctggtggtttagtgggtacatgtatgcctttctcttactacatgagattacaaaataattattagacatgagtctagcttgagaacatactggcaagcactgtctacaaatggcagtaaccttttatctagccaacaaggtcagaggttttagttaggtacattgtattctcaccaaaatgtaacattgttagtcattttaatgagtttttctgagcctctcattgcagtttcattttctacttctttggtgactaaagatgctgagggatttctcacatttctgctggccatctgggtcttctctgctgtaaagcatttactcatattttttcctaattctactttcctcctagctgatacatttcccccttttaatttgttggatactttttaaagaataaattctgggcaccacgaaagtgaatttacaacatctctgaaacatgatggtctgggaatttctgctaaagagatagaccactaaattgagaaaaataatccgagaaaatgacaacaaattataacaaaacaaaaccactagtaattttatctgatattccacaaatcttatagcatgttacaaacaaaatagccaatcattattgcaaagaagagaggtaatagccacctataatatccaatctttcagctttgggtttttcattttggccagctctcttttgatgaccaaccagtggttcatttttaataaaccacaattgatcagcatttttatggttgctgtgttttgaatcccacttaagaaatctttgcttaccttcaggtcatgagtctgttttcttttggaagatttattgttttaactttttgtatttagatctaaactctgtctccgggggaggggagccactgggggattgctgccctgtattttttccttagctttgctaacttgactccaagtctgcatccgttttcatgcagctataaactgaattgtttttatgaatttcatttttgtgttcatgctagcttaaagcacaatagctgttatgcaccgacttcctctcctgtggcactgcagaattcattcactgttctaacaattattttttttgtgtgtgtgaataacttggagcatctttaagcagtgagaagtccattccatcctgtctttgtaatcctgatctctctcaccgctcgctctttgctgtccttgtctattatttgtaacggttatgacttagagcctttaacataatgttaaatagaagttgaaagaatgcatatgccttttttttttatggcatcttattctttaattactattttccctcgctttccttcccccgcccccacaatccatggaggtccttctgagtccattcattgtttctcatatgtacacatgctcgagacttaggctaaggataggatcatctgtcacggagcatatctcaggagcaggcagattttcctttcttagtatccatcgattgcctatagctcttcctctaggagtggggccttctgagagtttcccttctatgttggcatattgagtgattttgtatctctagtggaaacatcgagtttcctctgaacaggccccagctacctgtggatgtttcacacatgacttctgtcccgctgaggttgttttcttctgttcctattttttgaatgtttctagtttgggttttgtaatccatgaaagactgttgaattaaaaacatttttttttctgtgataaatacttaatctcaattgggggtttctaccctgcctttggccattcagttcccagataaatgacacgaagtttttatagtaatgattagcctttaaagctgggcagatagcccctctatgctattatgtccacttccctgccaataactccattatatgacttgccatgttccatctggaatgctcttaagttctattggccagcccttgtggcatgttttcatggttcacctaccttgtggcttcttctctagtcacctctctctgttctcctcatggtctccacctcagacccaaattcaggaacaaaaactcctcctacctctcttctgcctagctgtaagcatctttattcaaccaatagtattaaattaaggagcaaggttacatagcatcacttggtatatgtgaagatcttctcacccctgggtgcaaccagaccttggggcccagtatttagcattacaatatgtaccaaaattttttctgcatattttcagataatcatgtgatcttgatttttccttgtactgataaagtttattacattggggttggttttcggatacaaggcaaagtctccattgctggacttagagttttacttgaccatcatgtctagttttctttatatgctgtgggaattagcttgctagtattttgtcttcctgtgatcttggtatcagagcactaacagtaccttcataaagctaattggaaactattcccctctttcatttgtggggagtatttatggaaggcctcagagaaacaggcttagcagacaaccttggatcattgcattctacaccccccttcctttagccttggtgcgtgtggtagtgtggaggatacatggtggaagcagggatacagcagagctttggtcactctcaggtcctcgacgcttcttctgttggtgctttaggcttacctatgttttcactattaccagtgttcttcagttgtgtcagttcaggttactgttttgttctttaatttcagcttaaagggctcctttagcacgtttcatggggaagatatgctaacaaagcatatttacttttgtttgtgaatatcttaactgtatcttcacctttgagtggtagctttgctgggcagagaattcttggtggacagtttttttgttgttatttgtttacttcttgtcatttcttttgtctctgtgactgtttcttatgagaagatggaaatctttaccctgtctttgatgggtcatttttctcttgtcattttcaaagccttgttccttttcttcctgactcatattatgtattatgttggtaagttagtggtcctacaggtgtctgagactttgctcccttccttctctgtgtgtgtcattatttctcctttctccttccactaccactaattgattttagggtcttttttttatatatagaattttgctatattctagcctccaattcctgatgctcctgcctcagatttcaaatgctgggattatatgtgactgctacgtctatacccttcttacacaggttagataatctcaagtgatctaagttcaggttcttaccaattaatttttaaatttgtatatactgttcaacctcataggttgctttttatttcagctattacagcttttggatgccaacattttattcagtagcttttaatttttaaacttttatctctttattgatcttctctagttaaagagatactgtcattgcacattctttaattctttagacatgattttctttagttctttgaaaatagttcaatggctgatttgaagtctttgttagctaactccaacatccgggcctctcagggatggacgttcctgctgaacgctttccagcctttccatgaatggctcatacattctattgagaactgggactcttatatatggcacgttgggacttaagtctccctccctttccatattctttgctgttgttcattcattctctctctctctctctccctctctctctctctctctctctctctttctctcctgtattccacacagggtgtggccactgagatgtctgcttacatcactcattagtcagcgatggcttttcaggtccttatttaaatactattaactactagtttttcatcctttcccaaggggtttgatatgtatttgggggtgtttttgatgctcaggcccgagtattacaactacgtattagacgttgtttattgcttacataggtcccaaggtcagagagaaaaggcactgggtctttcctgggtaggtttgcagttgtccacgtcaggcagccttctaagaatatgtgggaaacttacaaagttctctaaggacatctttttctagacattttcctcttaaattttggccaacatattgttagttgcaaacatcattacatcccataaatagctgtgaagttaaataatcgtgctaatttctcttgacaatcctggactttccaagtgtgagatactgctctgttgggtggtagtacccagtcaggaccttgtagggagctgcagaacaaatggtcccaggaaatggaactttctgagcagttttctttcttctctttccataactacagagatgatggtttccagagccagcagactcaaggctggccattaatacttctatggatctgtgggggaggtgatgggaataagttaaatgcccagctgatgtcccctggatatttatttgttttctacgacgagtgctctgtatgttgctagaagcttttagttgatatccagtgttcttaaaaaaaaaaaagtggtgttgaccaatggctgcctgtgttttcattgatttttatggagatatttaattatgaaggcacacattctgccatgctcaaagtcctgtttcaatctgatgatctattcattagtttctgtatgtgctgtgctagatgatattgagagagagagagagagagagagagagagagagagagagagagagagaattcagaactgctaaactgctgtgtaagattaccttcaggtttggcctaatgattccggcctgggataccaactacttgaaaggctgatgcaggaagacagcaagttcaatgccgacccaggcacctcactgagtctgtttcccaaaataagacaggactgaggatatgttcccaggcggggcacgtgaagccttacgctcaatcctaatggccaaaacaaaaccacaggaaaattatcttcagctatcttacatatggaatagtttaaggctcagaatttggctctatccttaatatatctcatgccatatatgaaaacatttcaaagtaagaaaannnnnnnnnnnnnnnnnnnnatcttcttgttgatatccagtgttcttaaaaaaaaaagtggtgttgaccaatggctgcctgtgttttcattgatttttatggagctatttaattatgaaggcacacattctgccatgctcaaagtcctgtttcaatctgatgatctattcattagcttctgtatgtgctgtgctagatgatattgagagagagagagagagagagagagagagagagagaggtgaaatggtagaaaaaccaggcttcacataggatctatacaacgtaggttggataatcctaatctgaaaggctaaattcaataatttcaaaaatctcaagctctgtgagaaagaacacaatactatcagtggaaaaatcctatacccgacctcttgtgacttaatagaaattcagaactgctaaactgctgtgtaagattaccttcaggtttggcctaatgattccggcctgggataccaactacttgaaaggctgatgcaggaagacagcaagttcaatgccgacccaggcacctcactgagtctgtttcccaaaataagacaggactgaggatatgttcccaggcggggcacgtgaagccttacgctcaatcctaatggccaaaacaaaaccacaggaaaattatcttcagctatcttacatatggaatagtttaaggctcagaatttggctctatccttaatatatctcatgccatatatgaaaacatttcaaagtaagaaaacttatacgaagtatgaaacatttgttcctaaatgtgtgggtaagagttgttctacctccattacatacatgagggatgtctgtgtgaaacagcacctagctcaagggttcagtgggaaaaaaaaaaacaaaaacaaaacccgtatgatctggaaagatactgtaaaggaacaggtataaacagaaaggccccagtgggtcacagagctgtggagttgctttggaatgaaggctaagaatggcagctaagggcctggtgtcagagttcagttctttgaaaggttatgggacctttggcgggtacttgaggagaagtctgatggaacttagggaaagccactctgtcagctggtgggaggtgaatgggaagtaagtggggccagagaagagactgtcaaaggcagtgatggtggcaggagagagggaaggaagggaaagagtagagaaaattgaggagtggaatccctgtggcccatgtgtgtatgaaggaaaaccatacaattttgcctctaaaagagtagcttttcctcatgaagaagaccgacatggtctctagacatttagggataggtgtcacaatctatgcagcatttgaagaaggagaggaagtgggcaaggcagcatccttggctcaggcatcgtccttctggactcccctggttgggctggacacctctcctctgtctctgtctctctctttctctttctttctcagtctctctcacacactcctatctcctgcctcttttctcagtgaaacactttttgtgctacatgaaaactgatctgtgtatgtgcctcatctttccccgtcaaatatgagttctgcaagcctgggaaccaactcgttctcctcatggcattgccaactgattctagttaggggcccaacagccaggtgataaactaagagagggtgtgggatatttggagggaagagaaagtggcagtgctgaagggttctgctagtttctagaaccttctccaagctcttgtgcttcctatgcctgagccatgtgtccagtgtctcttcctcaaagagctgacagtccacagacggtaggctccgtgcctagggatgagtgtgtaagaggtagcaccatagatgtgtgctgagcaaggcctccgactcagcatggccagtgccttcactactcctccatgtacattcttcatgcttcctagctgctgccctaggaatctctgactcccagcccctattgcttttccccaggctcttggaagtctgtgggctagtggtgcagtgggggagaggccactgaagcagggttccctactgctttgcaagagtgatctctttctcgaaagggactctttcatgatgatgaggtatgaggttgtgctagcctggctttaatgcttgagattcttagcttctctggagcaagggtagcttcttgatccacactcatttctccagagccacttcccagcttgttgtgtgccttgaagcccaggttgtgctggatgtaacagctatgatagtgtatttgcctccctgtctattcaggaagctgaaatggcttcaggcaataacttctctgagcatgattttccagtggagttcctgaacagtcatggcagtttccaggtgctcagtggcgctgctttgctgagctgggactttttctgattttagagattgacagctttaggctatgttctcaagttgagaagtaaagtgggatcaggaagagaaggctgtgtgtgtgtgtgtggggaccacccagcttcacccaccagatgctgaacagctttattggtaagagatacacacctggggatgctgacaaagagctctggaagaagggaaagaaggaaggaagagacaggtgacagatggcatggtccatgggttctgtggtgtgtttcttcaagctatatgtttccttttgcctcagggtcagggtggttgacacccccatagctgaattgtgctcatggtttgagggccactggtgggtggtggcaaagatgctttgtagcctccaggctgacagaaatctgaggacttgtttggaatacctaatgagcctggtgccatctgagaaaggggtgggggcggcctgtgcctgagagtgaggaaaggagtgcagcgtgataataggaccttacctttggggagcaattaagtgttttcaaagcgcgttcatgcgttcatatgcattatttcattctttccacagagagatgctaaggatgtattcttaacactttgattgttcaaaggaggaaatctgggcttatcgttgcctttttacccaaccaatgtaggggctgtggctgagattcttggggcctggtcaccagccttttgtccttggaccaggacagcaatggcagagagctattttccagctgatgtgcaggaagaatccaccaggaaattccccactcagccaggccgttgtcagcagggaacccaggctagtagaaagctttccctttcccagaaggaaagtgagcctggaagtcttcaaagaaggtaaacagtgttatatgggagaggttagcatgcaaggttgggcacccaggtggaaagcagtggtctaatttggcacagctggtacggtgttggaagtgactaaaccagtctcacccatttgctcagttattcactgcacgtagactagaaattggtaatgctaggtgtagttagaggacctgagggatgaggctgggggagagagacataggtaaacaaagcaagaaccggccctgagctaaaaactgctgttaggcacatagactgttctcaatattcccttgtgtgacagtgctgtgtggtgatatgtcactatcccttgtgtgacaatgctgtgtagtgatgtcaccattcacattgcagatgcagtaggggagcttggaaagggggcatggagaggggcttcacacttgtctaggaaggcctgctatagggatctatgcagtcttctctagtttcccaggcccctgggctgcagttgcacacctgtagctgcctgagctgaaaaacacggtgaggcagagcaaagtctttagaggatgctgttcttcgttgttagaaggatagctgtagatttatgttcttaccctcttctgatcctcattatctaggagaagtgaaaatgtaacagccacacaaaagactcagatatgaaaattttgttcagctttatagcaaagtagaactgattcagatgctggaccagaaggtgagtagataaacacatgtggggtttccctgtgcatagagagatactcattaatgaaggaaagcagcctggtgctacaccagtgacagggatgtatcccaaaacatcacattaccagagtccttgagattctgtttgtcatgttttctttcactgtaacaattacctgagcaaaacaattaaaacaagcaaacaagcaagcaaacaaacaaacaaacaaacaaactggaaagggtttattttgactcccagctgcagacgctcaggccagtatagtgagaaaggcatgttagaatggaagagtccatatgtagtggccaggaggcagagcagagaaaagcaggggatgaaatgggacagaagaaaggggagcaagaaggaaaagaaaaaccattgtctatgttggctttcttcctttctctccccttttccatccaggtccccaacctgttgaatggtgttacccatgttcaggccaggtgtttcttctctggagacattcttgtattcacaaacacacctagaggcttgtctcactcatattcttctcaatctagtgaagttgacaatcaaggttagccatcatatatagaaaatatgaatctgctctgtgcagatggaaagtccatcagtggtcacctggggtctgggtgggatatgagctagacatggcacaggagatatacaagagacagcatcaggatatgctgtcaagattaggagtggcaagtgagtttctgtgtgtattgtctgcctaggaagtcataaacaccaaagtatatgcaggcagagcactgggccacattctggagagccccagctaagcagtgttatattctatgtattgccaagctatgagaagggaaggctaggacctttcaggagtgagtctagtgtgaccagaacagggcatgggtctcactgagcagtgtggagtgagagttgcccagaagagcagagacaacagaatccatgtacacacagaaagattgattgtaaagaattgggtcattcagcttcagatttgagaatgtatcttatctgtagttgatagcctggggatccagtagttgattgcctggggatccagtagctggggatcagctctgcatccaaagaaaaaagattttagttacaatccaaaagctgaaaaggccaacttcttagctccggtatcctgatgtctaacctaattattctgttctgtgtatgcctttaattgctaatcatctaatatgagtcctacccctcccaactcactctctctctctctctttctctttctccctctcccattccccccctctctcttacacacacacacacacacacacacacacacacagaggcatacacacacacacaaatgtttgaccaaatgtctgggcatagcccagtcacatagacacatgacataaacaatcacagagatgccaagggggctcagtacagtaactgggtatggcagcatgtccattataccagggtgcctatctgagagattgtgccaggtaaagttgatatgtaaacaatatcctcatatgtaaataaaaatcatctatggaggtaaaactaaattgcagtgatgtctaccaaggagccatgtgtggtcctggcaggttcaggtgacgtgacccaggaggagctcagaagaggtgtctgaaaggcagtggtcctgtgtctgagagatttttctctgctgtctgcttgttgggttttgctgtctctgagcttcagaagtttcccgtctccttcagttgtttcacaagtttcattcttgttagctgggggtggtccctgctttgaatgcagctctctgaaatagggggcagatttgaaaagtgacttcaagtggacagttaccctgatcacaagaaagacagacataccaaccccagtttctttttcctcagcctcacctctccctattactggaagtgggcagctgggcaaggggacttgtcttcaggatgattcagaagagaggagccagtacaacagccttgggggtgtcagtaccaaccgcagctaggagctggagccagagccggagtcttctgagtggagtgtgactctgccagtggactctgagtgctgagacaccctcagtgtaatcactagggaataaatccaaccttcccttcttccgggagccccctggcttgctttgggagaactgtcttttatccctgtagtctggtgtgtgtgtgtgtgtgtgtgtgtgtgtgtgtgtgtgtgtgtgtgtgcctcgccatttacaaatgggaatacaaatgggatattccactgcctatagcaaccaggcaaccagaaggctcaacaaacccgggctgagccttctgagcctgtgcagattggagctggaactcatccatagagacgggagaaagcatggccacactcttcctgcttcaccattatcttgtagtttattccctaaaaaccccagagccatttcccattccagcttctttcttgagagcttttgacagcaattctttgaattcccagatccctcccaattattctcatatagttagaatggatttctatttcttgagcagaagaacccagtaatggacactttcagctggaactagttcaggctggtgtttcccatgccacccaccctccttgcccactgatcacctcgtggaggggggagcctcttccgctgagctctctgtgtatatattttgctgagcgtttgttcagcaccttgctgtcaaggggttgatcttgtgctacctgtgagtctttgggcagcttagcataatcagaccacatgagtgagcccaaagcaggcaaagacgttccctcagggtcagcactgtacttaatccctacctgccctcatttgaaaacagaaatcctgaacatctattttatactttataagacatgacatttatgtaactcatctctttgaagatggaaatagcctcatgaactttgagcatcaacagcttagaagtttccatggaagggtgttggggagctttgggctggcagggactggtgaaataggaattgttttagatggtatttgatttagcccctgacacctacaagttctacagtactatggggtaagagtttcccctggtctccagagccagtgctggcccagcagccatcaggggccagtggcttatactttgattcagtaagttgtctacaataaaattaaattgaggctcctcatttggataacaagacatgtgtataaaggatattacaagagactggtgagtgaagctgcatagtggcttgagcatcatgcgtgcatcccgaataaccaccccaggactgtggctgtccactgtgcggaccagaaactctgtgtttccagggtgcctggaggagaccccagctgctttggcgcacaagaatgtgctattcaattcacaactgacttcttgattatgagggagggctgaggatctacgtggctgtctcacttcttgtggagaaagctcagctggggaaaacattggtgcttagagtcaaaaggaggagtcccaccgaggggccacactcttcattcagtcattggttgacaatggcactggttgtggagggtgtccaggaagctgctgaccaaacaagtgaatgatgacgaaaagcagtctaacagtgctgtcatactatccagatagaggtttgagtctcactgggacctgtccgtggctggctggagtttcctcgctatttatcgcaaatgtaggagtctggaattacttttctctctcttcactgtagtcagtatttttgtgtagaggtcaagtttaagttccctgatgtttcttctttgaaggcatatatcccccatggctggagccatagcatgggccagccagagcctttaccactgatttcaacagtctgactcccaaagtaggcctttcagtaggttctcagtacttcagccaatgcctgccagggttgttatctggtattggctggtatctgggtgcacgctccgaagggcctcttggtgccttcttaccttgtttgctcgtggttcaaagttccccactttggtgctaaacagtcattgtgatggtctggggcccttgcaagagcagatgagtcattttgtccctatgcttgtgaatgaataagtccctccctatactaattggggactagggagatggagtcttttcttcaatccaggcagtaggagtccctgaggacatgggggtctattgatacctgcactgtacaaagtagggagggtctaggagctgtttaagagatttcatgtacttacatctatgggaatcaaatctttcagaccattctcaaagtttgtattagaaaaggagaccaaaatgtttaaaagctgcagtgggcttgatgtttaatagccatagtctcacatttgcaacattatgggctattgcctgtcagcgtggtccactgagtactccagattacagagctcaagtttaggttcacaccttttctgttcctatcagtgccacctaactaatgaggtcagaatttggggtgtttaacacagaccagcagcttgtgaatactaagaagcatatataacctggttttgctatttcttgttggttctagagtataaattgcacaatgtagtcacatttgatttgaggacaggtttatcaagtacaccaaggaccaaccgtgtgtatctcaaattgaatctgttacaacccaggagctagaaaggtaatctttctacacagagtaccaatgaaagagccatttgtatttcccatatttatgattcaagctttcacgtagacctaacttttggatgtctccgtgctgcaagttcctctcagcccattaaatagagtacacattaaggagatttgaatctagaaccatgctcagcatacctattctgagcagtgactggcagctgctggctcgcagtggaagctgtggcaagtcctttctgttggatttcagatttagttctacatcctcttcggcaagcatcctcctaccctcagagggccctcctctatttatccccccaccccccagcctttgctagtatggttccctgtggtcagtgcttcccactgtattttctactcccctctgtgttgtaagcttgctaggttcaggtcatttgcagcggtgcctgcaaacttttgcatggccaccgtcttcctttacatctgacttgattctgaagtgccagattccaagttgagaaggatttgttacttggagatgattttgccctcttttgtaaattaatttcctctcctgctaaggcagccaaagcacggcggtgattttctaccacagagaggtaatgaggcttaggggaaaatgcttaataggaaaacattgtcccacactgcgaattaggagctctggatggagaagcagccgatgaatattaaaaccagacagtgtgatgtttctgtggagggtgtgtgtgacggggcacatgcgttatcctggaagagttttgtctgtgccttcatgcgtgctagggaggtacactgagggactgcgaacaggctatactcagccctcaggcgtgtaagcaaggggagggggctaggcagagtggtgataggctgccttaggagttgtacagggaggacacccatcttcattacacacagtctggaaaattcctctcacagaatgtcccccaagctaacagttctccctaggtgataacccagacaggtctatgagaggagagagataaattcaatttgcaaggttttttcttccctcttctttctcagtctcttcctctgtctttatctcttccctggttccttttctctctcgatttctgtgtgtctcttggtagaacgcattatttatagagggaaccaagttttggagaaggaaaacatcctacaagatagacactgcgtggaccctgtccttaatcccactggcttcacctttgtagctcatttcctcactgagaagctgagaaatgtaacactttagccaacactgaagaggatcaataaaggaaaagacgaatttctaaaactaaatatccacgcctaaatttcctctggaactagtgaaaacaataggtcctttttgttgttctctcttatgtttaaaagtgctgatgtattctaggaagctccttcatccggttttccaggacaccatcctcgcattggcagctcctggcttactgaggctctctcttcctccagtgcccttttggtttgttttgctttgctttccttacaggatgcttttgctgtcctcctctgtgccataggagcctggagaggaacagatccacagccggtgcttaagaggcatgatgggaagggctgtcagtgacctcagatggcgtctctagggtgtagattcatgaacagaaatctcataaaagaggcctgaggaaggcagggagagaagaggtgacctcccatgccaggccttggggaatgacacagggacaggaatgacacagcagggcgcctgtctgaggagggagatcagtgcatgcatgttcctcagcctgctgcctgtgatgcagcacgggggacactcccaagcacctcttggcttcttgttaaaaagaaggcaggctggagggatgtgtctttaaactatatgaggaagaggttctgggatctgtctggcatttgctgcagttgtgttaataagtagctttaaaccaaggcagaaaatatggctcattgttagcagccacgttgagacagtgctgggggaattttgaaggctttgtggggggaggttagctggtaacatgtgggaagaccacatgggagaaacagcataggaagtaactgtggggtggtctaagctgttgtgtctgactggggaaggttctaactggagcaggcacaggtggaagtgcaaacagggaacatgcaggcagcctgagtcacagggcccaaggcacgcgtccccttaggccacttgtccttttgtttacttgtttgacttaattctatcttgttacattcatttattcactcagcaaacatgcatagagacggtcagactctcacactctgatcttgtggagcctagacacacgttcttctcataatgggcaggcaaaccaagtctgtccctgcatctgcctctcacctctcttagaaaggttcagtttggtggtgtaaaggctgggctctcagtgtctgacaccatcactgagtggaggggtagaatgttctagtgactacttctgtgtagagtcagtcttgggagtggtatccaaccagagttggaagaggttacatcagcttctttccccatgggacaatgctaccacgcaggtttctaactgcagacagatgtctcccatatggtagggttctccagagggaccaatggtcatttggtgaaagttgtgtatgtgtgtgtgtgtgtggtagaggcaggagcaccagtcaagctgggacaggagttgagaagaccctgaacgttggtccagaatcctggactctcttttgtgacctacagaggatgacagaccttgtacggtcaacggtgaggcccaggtagatcctctgtaggagggtaggtggaagcatgaggcttcctggatgtgaaagctggttgtctttaagaatgacaggaaagtgtggacactttgcttcttcttagaattggaaacaatcacccatggaaggagttacagagacaaagtttggagctgagacaaaaggatggtccatctagagactgccatatccagggatccatcccataattagcttccaaacaatgacaccattgcatacagcagcaagcctttgttgcaaggacggtgatatagctgtcccttgtgagactaggccggggcctagcaaacacagaagtggatgctcacagtcaactattggatggatcacagggcccccaatggaggagctagagaaagtatccaaggagctaaagagatctgcaaccctatcggtggaacaacattatgaactaaccagttccccagagctcttgactctagctgcatatgtatcaaaagatgacctagtcggccatcactggaaagagaggcccattggttaggcaaactttatatgccccagtacaggggaatgcaagggccaaaaaatgggaatgggtgnnnnnnnnnnnnnnnnnnnnnnnnnnnnnnnnnnnnnnnnnnnnnnnnnnnnnnnnnnnnnnnnnnnnnnnnnnnnnnnnnnnnnnnnnnnnnnnnnnnnnnnnnnnnnnnnnnnnnnnnnnnnnnnnnnnnnnnnnnnnnnnnnnnnnnnnnnnnnnnnnnnnnnnnnnnnnnnnnnnnnnnnnnnnnnnnnnnnnnnnnnnnnnnnnnnnnnnnnnnnnnnnnnnnnnnnnnnnnnnnnnnnnnnnnnnnnnnnnnnnnnnnnnnnnnnnnnnnnnnnnnnnnnnnnnnnnnnnnatagcattggaaatgtaattgaagaaaatacgtaataaaaaaaaataaaatcattgacattaagtcaaaaaaaaaaaaaagaatgacaggaagatagatgactgaaaggctgtgctcctgcttttaaatacttttttatccctgggccttttgaggtctttgcctcctccactcctggcctgggtttccaaaaccctatcatctgtatccctgttgtttgtaagtgtctcaggtatgacactatattttgtgtttgttctccgggtgtttcgtaacctcactgatcaagtctgttcttcactggcattcgtggtgaaattttgctctcccacaccattgtcattgggatgacagacctaacttctctcagggctagctacacattaattcccaagtcacatgtcctcagtttcaaaagcgtagcatcttcgaaatggcttgtccatgacccacctgaagtctgccctgtgggattcaggctgcttctgtgctttaagtctgctttctgtttctgtgagtctggaggaatgtgcttgcttattgatcattaatttatacaattccttctattctatgagaataatgagaacttctgctgggcttttgtatcccactctagccctttgtctttatctgtacatagagaggggagaagggagaggggagaggggagaggggagaggaggggacaggnnnnnnnnnnnnnnnnnnnnnnnnnnnnnnnnnnnnnnnnnnnnnnnnnnnnnnnnnnnnnnnnnnnnnnnnnnnnnnnnnnnnnnnnnnnnnnnnnnnnnnnnnnnnnnnnnnnnnnnnnnnnnnnnnnnnnnnnnnnnnnnnnnnnnnnnnnnnnnnnnnnnnnnnnnnnnnagagagagagagagagagagagagagagagagagagagaagaggcaggtctgaggagatttgttcatttaacttcagtgatcagtgtgaaactattcaattcacaattcctatgtcatcattagggtttctattgctgtgtttaaacaccatgagtgaccgggggaggaggaaatggtttatttcatcttacacttcctggttgagagttcatcactgagtgaagtgacatcagaaactcaaggtaggaactaggagggaagaactgaagcagaggctgtggaggaacgctgcttactggctcaaccagttttcttagacaactcaggatgaaatgcctaggggtgtggtgctgcctcataggctgggcccgcacacattaacccttagtaaagacagtgccccaggacctgactacaggtcaatatttagaaggcatcttctcaattaagattctctcttcccagaaatgtcaatgtttgtattaagttgacaagggcaaacagcacactctatagagttgaggttatttcctattaaaaatgaaggcactgagttttaggaaggttaaaaacctgtacagacctacagaaatgctatacagaagtgttgggatagaagctcagagagtttgatgtaaatattgtgctcactggagcagaggccccttggcagccccatctgtaaacaggaaaacagtgaaagcagagtgaatataactgtatggcgatctggataaataatttaacgtttacccagagaacaggatacaaggtagctcgcaaagagctggacttgatctctacatacaaagggcatgcacaatcttctgcttcgtgataaccaagaagcatgttatgatgtgactctgtctctgtagaatttatgtttacatccttatacaatctatagaatcctcctggtagggtgtacagttgaaagcaaatacctttagaaagtggggttgaagatagaaagttttcagttaaaatgtaattataagtttcacaagcctgctcttgaccacagcaccctgatgtgaaggcaggattggtctcccccaaccccctcaattgcaatagccctgtcctggcagaaatagcccttctcttcccaggagggaatatttctttgctcttctgcccagtttgtcctgcctccttggtttcaggactctctctctggtgtgtttctccctgtgtatttcttttgcttacacttattacttttagtgtcttaaatgcaatgcattggattaaggcaactttccccatttcctaccccaggatctcctttaacccactaaacactgttacttccaggattttctctagctaactagacttcttctaagtcagtctgctaccttggctgataatcaacagtggatttctttgaaacagcctcaaggtgcttccctttgatttctagataagaaggaagctttttagaatgtttgtattctcaaaccccttttctttcctgtttaggaaaaaaaagctgatctcatagctggattttcttcttttactgtgacttcagtttcttctttcagcaggtgtgaccattgtatttattaaaaaaaaaaaaaacaaacaaaaaacaaaataaaaacctctgtgaggttgacacatgtgtgtgtccctggtccctatagaaaaataccaacagtgtcaagttctgataccccagagaatagcaacagtgcccctggtataacgatggctttaaagaaacattaagtcatgtttaaaaatatatgtgtgtttgtgcgtgtgactgcagtgaccatagaagccagaagactgtgccagatcccctgtgttttactgaagatcttgcgacaaaatggtttaaaaaccttgaagctaagatgctttggcttcataaacactcctttcaggtttgccgaccttcttagcgatgacactatgtcactgaagaattaccaggcaggctttttttttttttaaattcaaatgtattaatctgccccatcaatgttctaacaatgcatgggaaagtaattgcttttaaagggaattatttcttattctgtgaaagcatttcagaaatagatatttggaaatatttatgttgttaatttggttattgctgaaaacagtgtgtgtcattcaagagtaccaattattttaaatcctcacatttgcatagtaaaatatcttcctgggaagtagaatttttaactcatatattaaaaactcacagactgaggagtttgctgtgttttgaagatggttatgaaaaccatgaatgttccaaacctgcagaatagaattttctaactcatgtataagaaacttccacttagaatggggaacagaatatccatggaaggagttacagagacaaagtttggagctgagacagaaggaaggaccatccagagactgccccacccggggacccatcccataaacagccaacaaacccagacactgttgtatatgccagcaagattttgctgacaggaccctgatatagctgtctcttgtgaggctattccagagcctggcaaatatagaagtggatgctcacagtcatctattggatggaacacaggaccaacaatgggggagctagagaaagtacccaaggagctaaaggagtctgaaaaactataggaggaacaacaatatgaactaaccagtaccccagagctcatgtctctagctgcatatgtagtagaggatagcctagtcggccatcattgggaggagaggcccttggtcttgcgaagatcatatgccccagtacaggggaatgccagggccaggaagccggagtgggtgggttggggagcagggcggggggagggtatagggaactttggggatagcatttgaaatgtaaatgaagaaaatacctaataataataaaaagaaacttccaaaataattttcagtgtgcttttcgatgactgtaaacatctgaccttttagtacgctcagggcctttgcttctaatgtttgggaagatggaaatgtagacatcatcttcttggcaaacactacagtgtttaaggttgagaaagtcataggacccaagaacctctttagtatggagaaatggaacagagtcgcctccttctgccacggcaacattttgattcaagttttgaagcaatcaaacacatcaatgagtattttaatctataacaccatagaggattatatgacatttttaataaaataaagatttttcaattagattaaaatttgtttatacagggacacagtgaaactaacagaagttatgaaacaaatggacctgacagatatctacagaacattttatcctaaaacaaaaggatataccttcttctcagcacctcacgggaccttctccaaaattgaccacataattggtcacaaaacaggcctcaacagatacaaaaatattgaaattgtcccatgtatcctatcagaccaccatggcctaagactgatcttcaataacaacataaataatggaaagccaacattcacatggaaactgaacaacactcttctcaatgataccttggtcaaggaaggaataaagaaagaaattaaagactttttagagtttaatgaaaatgaagccacaacatacccaaacctatgggacacaatgaaagcatttctaagagggaaactcatagctctgagtgcctccatgaagaaacgggagagagcacatactagcagcttgacaacacatctaaaagccctagaaaaaaaggaagcaaattcacccaagaggagtagacggcaggaaataatcaaactcaggggtgaaatcaaccaagtggaaacaagaagaactattcaaagaattaaccaaacgaggagnnnnnnnnnnnnnnnnnnnnnnnnnnnnnnnnnnnnnnnnnnnnnnnnnnnnnnnnnnnnnnnnnnnnnnnnnnnnnnnnnnnnnnnnnnnnnnnnnnnnnnnnnnnnnnnnnnnnnnnnnnnnnnnnnnnnnnnnnnnnnnnnnnnnnnnnnnnnnnnnnnnnnnnnnnnnnnnnnnnnnnnnnnnnnnnnnnnnnnnnnnnnnnnnnnnnnnnnnnnnnnnnnnnnnnnnnnnnnnnnnnnnnnnnnnnnnnnnnnnnnnnnnnnnnnnnnnnnnnnnnnnnnnnnnnnnnnnnnnnnnnnnnnnnnnnnnnnnnnnnnnnnnnnnnnnnnnnnnnnnnnnnnnnnnnnnnnnnnnnnnnnnnnnnnnnnnnnnnnnnnnnnnnnnnnnnnnnnnnnnnnnnnnnnnnnnnnnnnnnnnnnnnnnnnnnnnnnnnnnnnnnnnnnnnnnnnnnnnnnnnnnnnnnnnnnnnnnnnnnnnnnnnnnnnnnnnnnnnnnnnnnnnnnnnnnnnnnnnnnnnnnnnnnnnnnnnnnnnnnnnnnnnnnnnnnnnnnnnnnnnnnnnnnnnnnnnnnnnnnnnnnnnnnnnnnnnnnnnnnnnnnnnnnnnnnnnnnnnnnnnnnnnnnnnnnnnnnnnnnnnnnnnnnnnnnnnnnnnnnnnnnnnnnnnnnnnnnnnnnnnnnnnnnnnnnnnnnnnnnnnnnnnnnnnnnnnnnnnnnnnnnnnnnnnnnnnnnnnnnnnnnnnnnnnnnnnnnnnnnnnnnnnnnnnnnnnnnnnnnnnnnnnnnnnnnnnnnnnnnnnnnnnnnnnnnnnnnnnnnnnnnnnnnnnnnnnnnnnnnnnnnnnnnnnnnnnnnnnnnnnnnnnnnnnnnnnnnnnnnnnnnnnnnnnnnnnnnnnnnnnnnnnnnnnnnnnnnnnnnnnnnnnnnnnnnnnnnnnnnnnnnnnnnnnnnnnnnnnnnnnnnnnnnnnnnnnnnnnnnnnnnnnnnnnnnnnnnnnnnnnnnnnnnnnnnnnnnnnnnnnnnnnnnnnnnnnnnnnnnnnnnnnnnnnnnnnnnnnnnnnnnnnnnnnnnnnnnnnnnnnnnnnnnnnnnnnnnnnnnnnnnnnnnnnnnnnnnnnnnnnnnnnnnnnnnnnnnnnnnnnnnnnnnnnnnnnnnnnnnnnnnnnnnnnnnnnnnnnnnnnnnnnnnnnnnnnnnnnnnnnnnnnnnnnnnnnnnnnnnnnnnnnnnnnnnnnnnnnnnnnnnnnnnnnnnnnnnnnnnnnnnnnnnnnnnnnnnnnnnnnnnnnnnnnnnnnnnnnnnnnnnnnnnnnnnnnnnnnnnnnnnnnnnnnnnnnnnnnnnnnnnnnnnnnnnnnnnnnnnnnnnnnnnnnnnnnnnnnnnnnnnnnnnnnnnnnnnnnnnnnnnnnnnnnnnnnnnnnnnnnnnnnnnnnnnnnnnnnnnnnnnnnnnnnnnnnnnnnnnnnnnnnnnnnnnnnnnnnnnnnnnnnnnnnnnnnnnnnnnnnnnnnnnnnnnnnnnnnnnnnnnnnnnnnnnnnnnnnnnnnnnnnnnnnnnnnnnnnnnnnnnnnnnnnnnnnnnnnnnnnnnnnnnnnnnnnnnnnnnnnnnnnnnnnnnnnnnnnnnnnnnnnnnnnnnnnnnnnnnnnnnnnnnnnnnnnnnnnnnnnnnnnnnnnnnnnnnnnnnnnnnnnnnnnnnnnnnnnnnnnnnnnnnnnnnnnnnnnnnnnnnnnnnnnnnnnnnnnnnnnnnnnnnnnnnnnnnnnnnnnnnnnnnnnnnnnnnnnnnnnnnnnnnnnnnnnnnnnnttggtgctggcacaactggttgttatcatgtagaagaatgcgaatcgatccatacttatctccttgcactaaggtcaaatctaagtggatcaaggaacttcacataaaaccagagacactgaaacttatagaggagaaagtggggaaaagctttgaagatatgggcacaggggaaaaattcctgaacagaacagcaatggcttgtgctgtaagatcgagaattgacaaatgggacctaatgaaactccaaagtttctgcaaggcaaaagacaccgtcaataagacaaaaagaccaccaacagattgggaaaggatctttacctatcctaaatcagataggggactaatatccaacatatataaagaactcaagaaggtggacttcagaaaatcaaataaccccattaaaaaatggggctcagaactgaacaaagaattctcacctgaggaataccgaatggcagagaagcacctgaaaaaatgttcaacatccttaatcatcagggaaatgcaaatcaaaacaaccctgagattccacctcacaccagtcagaatggctaagatcaaaaattcaggtgacagcagatgcttggcgtggatgtggagaaagaggaacactcctccattgttggtggaactgcaggcttgtacaaccactctggaaatcagtctggcggttcctcagaaaattggacatagtactaccgggaggatccagcaatacctctcctgggcatatatccagaagatgccccaactggtaagaaggacacatgctccactatgttcatagcagnnnnnnnnnnnnnnnnnnnnnnnnnnnnnnnnnnnnnnnnnnnnnnnnnnnnnnnnnnnnnnnnnnnnnnnnnnnnnnnnnnnnnnnnnnnnnnnnnnnnnnnnnnnnnnnnnnnnnnnnnnnnnnnnnnnnnnnnnnnnnnnnnnnnnnnnnnnnnnnnnnnnnnnnnnnnnnnnnnnnnnnnnnnnnnnnnnnnnnnnnnnnnnnnnnnnnnnnnnnnnnnnnnnnnnnnnnnnnnnnnnnnnnnnnnnnnnnnnnnnnnnnnnnnnnnnnnnnnnnnnnnnnnnnnnnnnnnnnnnnnnnnnnnnnnnnnnnnnnnnnnnnnnnnnnnnnnnnnnnnnnnnnnnnnnnnnnnnntgggtgggtaggggagtggggtgggtgggtatgggggacttttggtatagcattggaaatgtaaatgagctaaatacctaataaaaatggaaaaaaaatttgtttataataaagggtatatgaattgaaaagtatctattgtggtggctcatgtttaggttattatgttagtgagactccatgggtatagctttctgacattcctaggaggcacagtctcacaacaaactccttgttcctatgcctcttacaatctttttactcctcctgcaatgattccgctcccccgcccctgtcccccactttaggtgcagaagttgtattgtagatgtactgctcaggactggactccaggactctgcctttcaatgaattggttgtggttttctataatggtctccctctgttgcaatgaaaaatttccttgatgagggtctgggattacactatgtatatataaagatgaatgcttagaatgtagttagggattatggtgatttggtaaggtggtagttgtaggtgctgcttcaagactgccctggtagttggctaaatttccagcactaggcatggtttccctcttactgagtgggtcttaagtgtaaccagagagctattggttatcgttgagctatgcatgcagctacacacttaggatcattgtaccacgttggtcattagtgttcccttggcatcacaaatgggtaggactgttggttgcttatagcatggctattttattttttctttcgatattaaaaaaaaaaaagaattatgacccaagcccataggaataagggacccgaatggtaaagtattgagtgggaggacaggggatgagagataaaggcgacaaaagcatagctggcaccaggagggcttgcataagctggtgacttgtgccaagcaagattattaagaagcacaacataatttagactatttgcaggttgaaaaaatgccaaggtcagtagagagctaagtcagacaatgttagcaaagagaacacagggtatctcaaacagctgcctaaggactgataactgagctcagagggaagactcagaaccccagaaactggaaccttgactcctatgaggtcctggctgtggcatcagacaggccctaccaaattcattcctggacaaggacacaaaacgaaagttccctttgtactttcatcagaaagtcttgggtcagtctggcttcctacagaatgattttgttatttttaattatgtgtatgtttgtgtttggatgtatgtatacacacacacacacacacacacacacacacacacacacacacacacatatatatacaagaagtgcagaggcattggatcctctggagatggagttacagaaggttgtgaactacccaagtgggtgctgggaaacaaagtcaggtcctctgtaggatcaccaagtgctcctaatcccagagctcactctctagctcctttgtgagctttagcctgacattacatttttttcataggtaatgcaccttatataaatatatatatatatatatatttattctgtaattcttcattaaatttacttatgggacaatatataatttccccattggattagtattctatttttgttatctataaagttctcacacatactttttttgctgggtgccaatattctttgatagagcattccacctctaaacattgtttcttagcaaaaagtcaatcaatcaagcaagagactcacacatgggtattctctacagcactagagagtcaaagattggaaacaatgcctctgtttttaaaacaagtgattacatacccaataataccacagaatgccttttggctattacagtggatatagattatctcaatgacccaaagacactctattcagtgaagaactaatactacacaaggtctatatgctacaactacattattccactagtaaactatatttcttatttcctatgggcataggaaacatacaaacacatacagtagtattatgaagacttaacatttctttttcttgtctgtgtatgtctgaccattactccttcacctcccgtcttcaggcagaatgtgagactacaggtcaaaaattagtgttcagccttggattttcccagtagacttcctatctgcgacagagatgctggttggaaaggagtgcttgggtagtcactgcggatgaggctgatactcctggcctcggctctgcgtcctaagccttgcacacccaggctttctgtctgttggacccacacagtcggaataaagatcacacagaatgtgggaagaggagtcttcttaatccttgtacgagactggtatctgagaactgtttcatgaagggcctcctggggtgggcattggagagtaatagagagtcaaaatccatctggactctgcagaggtaatgtttgtcactaacatccctgagccaggcagcctcagtttcagaagagtagacattgtcagggttggtgtggggaacacatctaggcagggagactgtgataacctattctagggaagcatggggcaacactctgatattttttttggcccactttgatttatttccttttcagtagtttaaatctgggaaggatacagtgtgacatggattcggtgcccaatgtcctttgcaggaaggttgcgtcagagtttggcatgaagcaagtcactgtttctgtgggccagtgttacttttcccagattgctctggttttgtttggtttgcctccaggagccactgtatctcttgcctaagtagacatcagtttcatctccggcctaaacaccttcaattttaagaagagctgtgtgttctctttagttccagagacctcacttgtagctggcaaacatggccgtgcaccacagccttccagacatgtttgcttcttacacttcctgttctgggcatggacgccaagatggtggaaagagccaccctggagtgttaaatgttcacctttgtgaaatgaagggactggggctgttggaccagaagaggtcccacagaggggtacttcagagcacttagtgtagattgtcagctacatcttagtaacttaggcatcttggaactcaccagttaggatagacctgaagaccaagggaagaaaaacagtaaccttggctcaaagtgacatgaaaagactgtgacatgtgtggctgtgaacatggctgggctgtggtatagactgtctagtcctttgggcatattccaagagtggtatagctggatagtatggtagatttagttttttgagggttctccatgctcatttccagagttggctgctccagtttgcattcccagcgacagtgaagggagggttcctttttctccacaatgtccccagaagttcttgtcagtggtttggttatcctgggcagtctcactgagatgaactgaaatctcaaagttgttttaaattgccaaggatgattaacactctttaaggtatttcttatccctttttatcttccctgttgagaattctctgtttacatcaatcacacatttttttatttaaattgagtcatttgtttccttgactctgttttctcagttctttatattctgaattttaatcctctgttggatagatagctggtaaaatttctctcccattctttgtttgttttttttttttttcccttcacttgattgcttgtttccttagctgtacagaagctttttagttttatgaggtcccagattttgattgttggccttaattccttgacaaatggaatccctttcagaaaattctttcctttgcctgtattgtttagggcaatgcttatggtttttttttttttctagaagtattttagtgttttaggtttcaaattgagttctttgatccacttagatctaatctttgtgtacggtaatagatatgagtcaaattttattcctctacatgtggatatccagttttcccagaaccaattgttgaagacacttttcctccctcctttatattttttttgcctctctgtcaaaatctgatggccatagttagaaggactcactgggcttccaccttactccattagtctgcaagtctgtttttgtaccagtacaattaaaaaaaaatcaccataggttaagatgtctcttgaatgtatgcttctgtatctgtggctcaaagaacatttcagaagatggggcagagagagtgtaagggtcagaataatagagagaaatggctacataaacaggactgtagcaacatcaatatcagtggacagattaatgtgaaaggggtcccacccctaggcaaagaactgcaggtgacaattgactgctgagagctggaaggagaatttgtctgtcccacggatgaatccccatatcaattgttcaatgcagagtggtcatccttgaaaccatatacacgaaaataacaaaagtagaatcaccaggtgatagatatgtgtgtgtttgcatacacatatgtaacaaatattaaggaaaggaggctatcatattgagaatgcaaagggataggagaggttcaagaaacagaaattggaagggagagagggagcaaagggaggcagggagtgataagattctatttcagtaaaaaacacaaaataacccagctttctgtacatgagcccttgtgagataaaccctgtccaaactatagcaggcaggcaaggttaaattcacaggaaaactcttgtttgactaagaaaaatccttattttctagggcatactattccatgcttaatgttaagtttctgtgactaggtgcagtggaaactcaggagaggcgttccagaggttttagagagcccatgtctgtgcagcatctggattcgtggcctgtgaaattcatgcccagaacatgtatattcacatcagtgcaggaaaacatctggaaggattcataaaaagctgttcccagtggtagcacagtttaattttctacattgaacatggatcacatttgcaataaaaatgcaaatctagaaaaatatttcaaagtatgccatgttcaatgtaggcaatttgcaaaatatgaaaagtacatttaaaaattaaatcatctgaatttccactatgtggaaataaccgtcattaatatctttatttattttaactcatatatatgcatatctacttaatgcatatagatatgcatatattcaaagtatatgtattttttaataaaatcagaattgtattgtttcatttattaccatcatcatgtatattttttctttcaatgcagttaatgagcaatttcctttctactaaatattctttggatcctccttaaaaattctacattcagtgaagtttatggtaaaacttctgcatatggatgaagatatgagcattggaaaggtgaagcgagtcacccaaggacgggcagctggcaaatagtgcacctgggatttgaacctgcatcttctgactattgaaaccagtcttgataaggatggaagaataaatgaagaaatgtgatagatgggtgtaaaactcttgctatgtgtgggtccttaatgaatccagctctcttttatacttttcttatctcttcctttattggaaacccacccttgggggcaggctgtgggttcaggaatccacccttggagagtctttgggtttaggaacccagccttggaggcagtctgtgctcccccttgggggcagtctgtgctcctgaaaacccttctgtaagagcttattggtagggctgctctctcaagcctccctgcatgactctgagcctctgctttgctctcttcttgcccaagttccagctcctgttttcccagccaggccctgtcactgtgccctcaggtaccctgtcattttcatgcttttgtttaggttactcagcagcccaatggcatttctgcaaaagaaaagatttaagcactccaggtggccgaagttctcccaatgtcactttcagatcaaagagatcaatccaatgactttattgtggaaatagtaagtgcatttcagttgggagaagctgaaggtctataaaattccggcagatcatcccaggaatatatctagagatataactcatccaggcatcaatggaaatgaacacctgttttccaatttcttttctggaaactattctggagtgagctctaagaatttacagcatagctgtggaaaagaccttagaaggcaggattccaggagctcttgggaatctgtgcaggagagcacttccttgagcctgccttcctaggaaaagagctgaaggaagactgcctatgtgttgaagatatcctccagggctagaagagtgtcagcctcactggagacaaagattaaatgagggcaatggctgggtgaagactgtgaaaaaagacagacaaggagtagatggggtgtcctactgaacgccttcaggctcagttagggaattgcaatggaaattcctctgagaatgttctactctgtcagttctatctgtcagagagagaagggggtgccagggagaataatatccatgtcctgacttctgacccatctgattattttatattactgagacagaacaactacggctgaaaatggaaagcagtttgctaataaactgacttttaccacaaggagactatcatgaactattaactgtgctcaatatgatcaaaggggttcttaagaagaaaagaagacaaatgttagggaactctgtcttctaggaagggcacacaaagcagcatagctggccttgaagagagagaggaccaaagctaaggaatgagtcatttctagaagatagaaggaccaaagaagtggtttgtaatcttgaggtgtttgtttattgttgtttattctatctaggggtcttgattgggtttgttgatagttccacactatgtcctgattggggcttgatcttggcagaccagtctccactgcctagagaaaaagccttctgggcctttgttggtagtcaggagtaagaatcgaatttgccatatttattatgtatttgtggttcctctccctaactgtctgcctatctggaatcagaccagcttctagtgcctcacattcttggggctcactgtcctgccatcaccctgatgttagtctagtaagacctattccagacttcaggagagtcataagtgctgtttatgccactacagggaggcaattcaatagagaactaatacaatatgttatcttttttcatgatgagtaagaagatctcagcatcagaaggttcaacaagacctacttacatagggaaggatgagaaaactcagacttgaccttgatctaggtcaacctaggttgactatggcagtttgtgtatgctggtcaaatggcagctgtgtggaccaggtgaatctcgctttgcacaccaggtggatctggctttgcacaccaggtggatctgtttttgcacaccaggtggatctggctttgcacaccaggtggatgtagctttgcacaccaggtggatctggttttgcacaccaggtggatctggctttgcacaccaggtggatctggctttgcacaccaggtaaatctcgctttgcacaccaggtggatctggttttgcacaccaggtgtatctggctttgcacaccaggtggatctggttgacagtggcttctctgtggagagttggccttgggcaggcatttcacaaggactactttccaagggaactaaaactgccaaattacatttgaaaaataactaccctctgagatatttgagcaattgtgcttgactttgcttgattaactattttgatgaaccatgtgtgtgcatgtatgcagccatgcttatatacttcagtgcaaaacccaaagcctcatgtatgctagtggctccatcattgagcaatccattgaggaacctaagtttcaaatgagattttctttaatgtgtcttcttgtggcttctttgggatgagtgtgtttttattggtgatatcaagtattaatttctcaaagtttttttttgggggggggcaaaggttcagtgattgtctgctattacccagctaaaggtgatcagaattgttttctgattactccctgtatattgatattggtagcctcctatagatgactgctgaatatggctgccttgggttggagaacccatctgctgccctctcctgagtgaagcatagaatccaagagccttgtctatattttcaacatggttactcacaattcctgacgcctgtcttggctctcttgtcatcatggcatattatgggcttcacagcctcatatttctcatttgtgtgatgggcatcctaatcaaaacttctccatgggcttaccaggagacttaaagggtaaagccttatagttctttgagcatgcatagcacatattaagtgctcacgtataaatactgatttctctcattgtctctaattttagaaactttaatacaaaagattggctatactgaaagttctgggaaggggaagggtgcagtctgcccttgccaagattaagatgctggagattctttgggtatgtgtgtgctagaacctcttcttcctcaatatcgagtcttagcaaaaggtaaatgtgttgtagggggtccagctttctcgtctccacttcccccagcaagatcttcaagatcatgattatagtggggacattcagatgtcttagaggaattttcctggctggtggctttggagaatatagactgaaaagcttgtcactcatggaagacagacgaatgtggcatgaggagtctagatgctgatgggccatttatgtcttcactggggaactctgtctctgcaccatgggatacttaacatcatccttgatcttcttactagacactagtaatcccccaaatgtcatacccagccccccagttatgatcatagaaagtgtcttcagatattgcaagtactccctagaggggatgactgatctctagtttgacaggttgtacagagatatcagaagaagttattttatacagttcccataaaatatgctaagcacaggggaaacctcaaggaagagtgggtatggcaagtgggtgtagtaagttggctctgtgaagaacaaaggctgacccgagcctggagcaaggggcttggtgtatgacagaaccttcactgaagctcctttggtggttgcaaatgaaggtcagagtttgcgaatagaagtcagccttttcagtaacagtttgaacagatgaccccaacctatcgtacatttggctttatatgttcattctttcttgtaaggttgaacagtttccacatcctaatgtttgtgggctactcctgtctctaggatctgtacaacctcatttgatgaccgaacagtgtccaggcttcatcctagattaattaaacccagagtttctggagatgggatctgaactcagaagtttccagaagccttcagggatgaaaaccttaggtccaaagtaagagaagagagccatgtgagggtttgtgacactgactggggcatgggctgatggaaatcctggaagctgctgtccatgtctgggcaggctttaaattaggacagttgagaaatgtccagttcgagaaatcaaagcattgttttatttcataacattaaaccctcattgatttgtaaaaaaacaatataaattaaaattaacttattacctggcctctgggtgccagtagacattttattgatgtcattaaaaagtcacttttaactaagtatgttttatttgcacatcacaaaaactcgataaaatatttgaggtcagcttttgctctgagctgggctctggttctctggaataggttctagaagttagcttttaagattccatttttttcctccagttttccctaaaagaatggttcatattgagtgtaagcatctttgttgttttagtctcatgctttttccttcagatctttatggtacctattgtgtgcacggcccatcttagaggtttgggggcagaaaagtgagaaacagtttcctgaagggtgtgtgtccaggactttggaagcacacactcatgcctgcaggtacctcattcctctgcagaagtccatgctctaaaatatgggaagaaagttaagatatagtgaattttttttcagatgcacttagcagagacagatccaatagattcataatccaccataggggacaatgaactgtcctttctacaggactgcagggaagataggatagcctgtggtcaaagggatactatacctgcaattccagagacatctggatgtcatgaagccaaccagctagacagagtcacctagtcatgatccagcaaggaagacaaccactgaccctgctggaagaccagagcaagtggggaagaagcaggccagagaggccagagaacgtttctgaaaaccgtctgcatacctactgggggatcaaaactccactctagatcctcctcctagaggcgggtggggctggggttacctaggagtctggacccctagcagagacccagttgaacacaaagtaaccaatgctgcgtgtgccatgtttgcttccctggtaccagaagtgggagacattgtgaaaagattctgagacaaagaaaggctgtgctcctttgacacatctgaggggaagggtgctgtaatgtgatgattcggttcctctatcccatcctttgttcacatgatacttttcactggttcactgaagcgacgtttgctgtgagtggcttgtaaggactgggatttgatttagggcctaggggtgacaatgttccatactgagacataattggcacctcctggatgtggttaacataggcacgcaaatgtggagcagatatttattacaggggactcatgtgcaactgtgtaagcttcattgctagtttattttgtgaggatgaggataaacattaaaaatgcactacaaatgccaggcctggtaatcttagcacttgaaagtccgaagcaggaagattattatgagttccaggccagcctgagctacatgttgagttccaggctacctgggactacagagtgtctaaaaaaaaaaatccattagttattgttatggtttgactgtaaatacttcctgcaggcttgtgtgtttggatgcttggctagtgatgctgtcttgagaggttatcgaactttgaggaggtaggggcaagctgcaagaaatagtttagtaggggtagccactggggatgttagtatggctccgtttccagctggagtgctccctttgcttccgagttggtgctccatgggaaacagctcttttaagctcctgccttgccagagcatggtactccagcttatgtaggcatcaactccccttcccgatgcactgagatccccaaaacggtcaagctcttaggttactttggtcaggtgttttgtcatagtgatgagaaaaatcactgatatcctcatgtcaaagcctggcagcttggtggatttgggcacacacacacacacacacacacacacactgaaagagccacatttttatcagaatgatctcaaaagtctctcatctgcttgtcctgctgatgctctgagtctcagagagcaagtcaactgaattcttggaatagcaagcttacttctagagaaacccaaggggtaggcttcgattctgaaaggaaaccttgtcatggattttccctgaacaccagactgggaaaattttatctaatcaatcttgcatatttagttttggggtcagatttacccttccattgtaaaggggagagcgtaggtctcaatgatctaggcagaaggtctactttaattcttaaagcagcctgcttagctgttctgtattgtactgagtcacagttgtactgataattggaactgtaactatgaaaagttgtaagggcagaaatatactacaatgaacttacagataaccaaagggaaaaagagccttatgccagaagacagatgggaagagaaacctgtcaggttgatgttagttctgagcttcctagtaggcaatgcaacaggagagtaaactaaaactctcagcccttcctgattaccacaaagaagagtggcagcccattgggannnnnnnnnnnnnnnnnnnnnnnnnnnnnnnnnnnnnnnnnnnnnnnnnnnnnnnnnngaggttacctttatttttttttagcttaggctttggaggcatttatcacatgagtctctagataagggacatggaacaacataatgggtagtgtctctgcttgcagttttacaaacaatgcaaatgtgatttgtatggctgcttcttctatcagccctggataggagccaaagtcataaacaatgtgttattttagttccgtgtgagttttgctgtggagagcggagatggtatcatccactggtgcttcctacagatttgggcttggcacagggtagagtttaaacgctttaagagaaattaaaatgtggtgcttcctggcctttctagctagcatccacttcattttaaagatgtaatttcaatatcatctgtttgaaaaaaaaaaccattcccgagtacctgaggccatgctatgtgctctactatatcctcatataatgctctgtgtaccacacccccattgtacacctcctcactatccctgtatatgtgcctatgttgaagacaatttagctttgagtggtaggtatgatgtcaggtctgcttgtactcctggtgctggtacatggcttttgtgggtgataatttggcattcaaacaaggtcatttgcagagaggtcagagttccagtttcggtaacggagagccaggttcaaacgtgaggcttcatgatttggatataaagcgctccccacaggctcacgggtttgaggacttggtccttgactgacatcactgtctctggaagctgtagaacttttaagggatgggaggagcctgcatggaagaagtggctcaccaacgagggaagcctgggggctaatagcaagtttgcttctggccctattctctctgattcctggtccgccaagatgggaggaaaataccgcctgctcttgatgccctgagaggctgcccactgctgtgatttccccatcatgctatcactcacctgtatcactcaaaccaggagccaaaatatttttctctcttttaatttacttctacttttaatttaatttattcgttatttagcaggtacaatattaggcaggactagtggatttttcaaacagaaaccattttgttcactctctatcccacattctccccatcacctgtggggaattgcaggctggtctccagtcgagctgaggtctgaaccccgatggtcataattcacctatatgacatggtaggcgttctctcatgctcctggaactccggcccctgcctaaggtaccacctcccacagcccccacaagagaagaatggtcagtagtcacgtaagcaatggcccaagcttctgaccttcaggctaaactcctccccagttacctagcaacagtgaagaccataaaaagggatgctcagcccccacctcttgctctcttattcctttgtcctctcacctctctcttctcttctctctactcttccctttttactctttctctctcctctctcctttcactttgtcctctcctctcctctcctctcctctcctctcctctcctctcctctcctgctttctctctctctctctctctctctctctctctctctctctctctctctctccttctctctttccccctgcatttctataataaagttcttaaaccatagagtctgctccttcaagttccgttgcgcactctagtcagtgttggaaacttcttccctcttccctctctcccacaaccctggtggctttagcaaatagctccaggggtgtccccaggcagggctgccccctggccaccccctgaagagtgggatagaggaatgcccacccagggatgagtggatagggtagatagcagtcctcccatgcctggctgaccagagaatagggaaactatggcggggtgtgggcatctttttcctcccaacctttccccagggctcccccgggcccccctttattttgttcccaacaatcacccataatatcccatctccttttatgtcccccatggccctccattctgctttcaagccacacgagtctccctggacccattgtgcactatgtctctgcctcctgtgctctcttctctagtttggtagactttgcacacacactactcccactaatatacttactcggagatagtcaagctagcttcttaattttctgtttctctgataaataactacttaagagagagatttttattttggctcacggtctcagggagcagctgtatgccatggcatggaagtcagggtgggtgaaacttgagggggccaggcacactgtttctacagccaggaaacctaagtaggtcaggaagcaggagctgatacagaggccatagagggatgtttcttactggcttgcttcctctggcttgctcagcatcctttcttatagaacccaagactaccagtccagagatggtaccacgcacaaaggaccctttccccttaatcactaattgagaaaatgccttacagctggatctcatagaggcatttcctcacctgaagctcctttctctgtgataactccagtttgtgtcaagttgacacacaaaaccagccagtacaacttgcatagactgctctcaattctctcattgcagccaacacccacagcagctcccctttccagagaaggcatgcattctttgtccctcttctctctctcctcagtaggatccaggctgattgaagaaagaggcaacctgcaacttctctgcagcctccaaactcaccattatagaagacaggatgcctaaggtcccctccttctgtatatgttgaagcaccccagatcctctgttctgtagatttttaaatcattcatcctttcagagagatgtattgatcaaagtgagccagcatgtttgaagtatttctttgaacagcctgttataaatccccagcccctatgccatccatctgacaaggtgtcagtcctagggttactgatgggtcctcccctcctcttgctgaggattgcctgacatgtgctcattctgatgggttgttcaatgaagctgcaggataagaatatgccatccttcccctctaggagtgataaacaggcctgagcccaggatgggcttatgattttgatcaagaattctctaggatattgtgtatgttctacttctgcatccctaggagcagagagccccctgggcctcgtggctgcagatgaaagagaggagaatcttccctccgccattctagcgtccaggccagtggttccaccttttcaaagctcaggaaggtaacattcttatacaatagttggagtttgtgtctcagtgggttttcagggtatggtgtagaaaaacatcctccttttgattttttagctttgctgccaagctgttgtcctctgtcagcttggcacagaccacggatcatctgcacctttcccctttctaacttatgtgtacagactgaatatacctaactctcaaaccccaaattctatatgttgtaaaatcctaccttttgagagcaccaactatttaataaaatatgtaaaatattctaaatccaaaaaggcccagacatctgaagatcaacagggacactcaactgcgaccactgggcattattactcaagagtgtcagaaccccactctacttaatttgtgcaaaaacacatttatagacttttgattaatgtccccctttatcatcttttcattaattaggtgaatctgattgacggccatgttttcccctttccctcctagagtatttagaaaggacaataaggagatacaaggtcagaggatctgatcgaattggctgggaacttgaggccagatttcagaaagcagacactaagtagaggagcaagcatgttagcacgtgcataatctcagcactccagagaccggaggaaaggaaactgatttagtaatgtgaagatatcaaaatgtaaatgctcggtaactagatgctttggggtgggtgtaagctgactctacttgtaaacctctgagtccttatcactaagatctcaaaaggcaaggaaggcaagtgacaagagaacacaggaaagcaagcataggtttgcaactgaagaatgtggaatacaaacttctctcccttgtgcacccctagaaggctggtagctggagtatacttgttatagtgtacataaatggagtatacttgttatagtctgcataagtatacttgttatagtgtgcataagtggagtatacttgttatagtgtacataagtggagtatgcttgttatagtgtgcataagtggagtatacttgttatagtgtgcataagtacacttgttatagtgtgcataagtggagtatgcttgttatagtgtgcataagtacacttgttatagtgtgcataagtatacttgttatagtgtgcataaatatacttgttatagtgtgcataagtgcctagaagttgacagcctccaaaaagtcccatgtgctgaaagcccacagtgcaagtaatagacctttaaaagataggtctagtgagaggccttcaggttactgggtatgtgttcctgcagccaactggtaaaccccagagcctctcttttatttttcttttgcttttaaaaatgaggtcttgcaccgtagttctgcctaacttacaattccatacatagatcacaattgctttggacatgtgtccccttacagctctgcctcctgagtgctgggattacaggtgtgagacagcacgcctcgctcccatctgtctgtcttccatttctcagacctgagaggagctgttttactagaccaggggttcctgccttaatgccctcaactagctataggccgatagcaatgtggctaactgatcatgggctaagctctaaaactgtggtggaatataaacctctcttgcttataggctgattatctgagcactgtcagactgagggaaagctgacacagcaaccttctggatactgaagaacacctttctggaaagatagagaaactgtagggaaaaatgctcacgtactgacattgtggctagggtgtctttcaaggcaagtgatgccattttttgatatggtttgaatgtgtctctcaaagtttcatgtgctagaagactaaaccttagtgtgtgatgatggaggcgtggatgtgtggggaggtgattaggttatcggaagcattatccaaggggaatgttagcagttcattcagggtcccactgctaatgtaaaagtgaactattgtaacaaagagccaagcctagtcagaaagagtaaaggctagccccagacagggcaaagcctagtcccagataatgcaaaggctagccccagacagggcaaagcctagtcccagataaggcaaaggctagccccagacagggcaaagcctagtcccagataatgcaaaggctagccccagacagggcaaagcctagtcccagataaggcaaaggctagccccagacagggcaaagcctagtcccagataaggcaaaggctaaccccagacagggcaaaggctagccccagacagggcaaagcctagtcccagataatgcaaaggctagcttcagacagggcaaagcctagccccagacagggcaaagcctggtcccagataatgcaaaggctagccccagacagggcaaaggctagccccagacagggcaaagcccagtcccagataatgcaaaggctagccccagacagggcaaaggctagcccaagacagggcaaaggctagcctcagacaggacaaaggctagccctagagtctcttatttgctttccttgcttgtgtgttggtgtttctcacatgcactgccactgtgacaccactggatactgtcacaccccaggccactgtcaaaatggcatctgaagtcaactctagaactgcaccataaacttattttacttatgcattatttagcctcaggtattttcttagaggaagtaaactaagacagaacttactggccaaaagctgcatctcatgcctttcagtgaactttttaaatgtctaactttaaatatggaggaccacccacgaaccattatgtattttagaaatggcttttataagaaagaaagaaagaaagaaagaaagaaagaaagaaagaaagaaagaaagaaagtcaaaacaagagaagaggatccaggataaactgaccaacatgaaaatttcagaaatattgtaatacatttaaagtagaaacccagtttaaaaatgggggcacagaactaaacagaattcccaacagagggatctagaatgtcccagaatcacagaaatgctcagcatccttagtcatcagggaaattcaaatcaaaacagccctgagattccacctgacacctgtcaggatggctaagatcaaaaactcaagggacagcatatgttggagaggatgtggagaaagaagaacactcctccattgctagtggaagtgcaaacttgtacaaccactctggaaatcaatctggtagtttctcagaaaattggaaatagttctatttgaagattcagctatactactcttgggcatatacccaaaagatgctccatcataccacaaggacaaatgctccactatgttcatagcatccttatttgtaatagccagaaactggaaagaacccagatgttcttcaacaaaggaatggatacagaaaatgtggtaaatttacacaacagagtactactcagttattaaaaacgatgaattcatgaactttgcaggcaaatggatggaactagaaaatatcaacctgactcaggtaacccaaaaagacaggcatggtatgtacccactgataaatggaggaatacccaggggtggtcaagaagtagagaagggatgagagaagggactcagtgggggagggagggatgaacagcatttggggtataaacaaacacattaattaattaaaaataaagaagtagaaaccaattacactattaagacagaaacaaaatatagtaaaaaagaaagtatgatagcaataaaactataaaaaaatgaaatgcaggaaaacagaggtgaaatattagaaaatccaattgtgggaaagtaaaacaaaaaggggaaaaaaaacagatcaaagttggtaaaaatttgtgcctcagttctagagttgaatattattctaaaaggaattctagactgagaacaaaaaaaaaaaacatggataaaggggaatgtactgatgatgatgatgatggtgctaaataacagagcttaagggagtgcatcttcatattaaaaagtcctagtaaacattttgatctttgctaagtaaattaaatgttttctcatgaagattttggtttagcaaggtgcagagaaggtgagacatagaacaaggaagaggatgatggagaggtttgaggaggaaggggtatggcttgcgagtcaagctgatgtttgaagatacctgagagtaatagtttctttggaagacttaattttaacatacgttgtgctatgtgaatctatcaatcaataggataaccaaaaatataacctttgctgtaacattaaatattaattaatccccatgcagggtcgctacccttaaacagcacaatagctgggccactgcctaacctcccagtagttaatcctaagttattacttactaattctgcgttctatcttgtctgctctagacccagttgggaagccctctcagccacgctcttctggttccttcacatggtggcaatgcctctctgttctgctctcttcccaggcttggtgtctctcctctcctctacacttccctggcatgggggcagatttccttctcccctctctccgctctggatcccaagcccatgaaatcctaaaatcctgcctctgtctgtcctccccagctattggctgttggcttctttatttaccaatcagaaccaactgggggcaggttcccagaaattacatgcagatactctcctgcaaacagtttctttggggaacataattagcatttgtaatacaagcagcttacacattgcaaaactcaaaaatttgtatgaatgtatgtttttaaagtgacttctagatgtcggctttcaaaaaaccactatgttccaagaaggatttaaagttagtgattgcagatcccaggggaggagtctcaggataaacttctgagttagaggctagtggggcatctgggagaaggaagccagctctgtgatgagcaatatccaggtctgctggatgttaaaagcctattttatatgaggcagtaaacatttggaaaggataccatagcacttgtgcaaataaatataaatcagggtaattaaaaagtaaaaacagaggctgcataaggagaaatcagtatgatcataacgcacaactaggtttagtaaagaataatgcctgcattatgaggcaaagtttacattatgtatgaaagagtcttattgaaccaggagctcacctgtcacagagttgtcctagtagcactaagtatatccagagtcccacacccgtccacaccatcagcttagactgtgtctcccagtggttcttagtggcttcatagactcgtaatccatccccattgtcagtttagagcatgaaaaaagactctgtagccatcagtagccattccccatttctttctccaactcacctgtcctctgccccacatcctgctccttatgcccctgggtgatcagttacttaacttcctatttctttatatttgctattctacatatataacttacatctacataaaatagtatatattttgaaccattatcttttgatatctcttctaactacacttccactttgctctctcatccccaccagtgcaggaacacatagaggcctgaggtcagtgttagttgtcttcttcgatgcatcttctttttaaagatagtgtctctcgctgaacttagagctcactggtgtcgctcgactggctgtccggtgagcactgcaatctctggcttccgtagctcagcactaggatcatgggtacaagccgacaggcctaggtttttatgtgaattctggagattagaggacaggtctttcgtcatttgtggcatgcactttgcccagtgagccatctacctagtctcttccttccttcttctgtgaagccaactttttgagcttccccatgagtgaggtcagtaggttatttcacctaacatgtccccaggttaatctgtgttgttacaaactgcaagattctgttgcttaagggttgagttgaatgctgtggtatatatgtacgtcatcttccgcacgtcatcatccggtcctttttgatggacgcttatgctgattccatgttgactgctgtaccaagagctagaacacatacagaagtgcagaatcaagttagaaattgtgacatagctagatagcaaatgttgcgaaggggaatgaaaggaagacttgtaggagagatttaaatcctcattatcatatctggaagataatagataaagctaaataacaatgccaaaaatgagttaaccatggacaaagtatgaatataattacatgtgattcagagatatggggttaaatcacagggtaatagttgaaaattacgtttgtctctatagagcaggacctagtggcaggcagactaggaagtgccatttgtcagtagctagccttttgaaaatgacagaatttcaaaaatactagctttgtaaaattatgatttagtatagaataatatgtttataaactattgtctataattgtcacattgtgtcttgaaattactcagtttatattccttttaaaaaacatttgattatgttcttagcacattggtattactagtgtttgatattcagatttttaaaaattagtgttatttttcctactgttgccacaaagttttaaaacagagttagagttaataaataaaaggaatttattcaaattatattgggcaagaagtgaagtgagcagaatgctggagaaagttccagagcactgtgggaagctgcatggggtggatgcagtaagatcaccccaggtgtagtctgcataacacaagacttagtctactttgtattgtcacagtagtaccatggctgggtagtttaaagaaacataaatgtattactcacagcttgggatgggaagtccaagatcaaggtccttgtatttaatgtggcacttcatgctgtgtcattctttggcagaaggttgaagagttgggaaatagatagaatatgggtaaagaacctgcttttattaggatcgcactccctcgatagtagcatgaatcgattcacgagaaccaagttccttcctaagggtttgtttcttatcactgttgcactggagattgtttcccatgcatcagtgatggcatctacacagatcaaggattcttctcagggcagtggcattcagttcccaaactactagcgatctgtccatagaacctgagactatagtgaggtccagtcatcagtcttgctttcctctcagcctttcaagttgaagaaaatagaattgagagaatttgaaaacggaaaggatggaaaaggtttctggtggtcttctagcctgtttgtggtcctgtactgtgccagcctcaataatgtttctactggtggatggagggggacggcaagagcaggatctgaaaaggtctgtgagtccggatacatcactgggctggtttcagcagaatgcagtcacaagataattggaaaatctcctgttaggcctgagaaccttctgaacaggtcacataggggaggttttgtgtgtgtgtgtgtgtgtgtgtgtgtgtgtgtgtgtgtgtgtgtgtatgtgcatgcatatatgctgtaagtaacttagaagttaataaatacatttcagtgatagaaagtgatggagctttatgtaaagtgtaccatctctggggctcaggtggcttggtatcagtgagccatcaatggagaggaagcagtgatctatagattgatggaagtctctgtggctcctgccctcctgccattccctgcctagctctcagcagtcaatgccatcatcctatagctggagctgagtgtgctggcaactctgcaggctcaggagttactgtatcacctgcccttatggaccattctcatttgctgtttactaccacgattacctacctttctctaactttaagactggctgctccgatttcctgctcccttaggaagtcacatctgaatccaccgtcttctccattgagcccagcctcatttctcttctgatgaggaagattatagaagttatgtttgttttccctctctgtatcaaaccctagttgattttccactgagaaccatgtccccacaatgtttttttcataacagtttcaaactaccatcattcctctccagcaaatggcctgtgccatgttgtgggcaccttcctcactattctagaccatggtaactgatttcaactgatttgccaaatgtccctcttatgcctgtgacatttaccttcaaggctaccctgatctctctggactccaaatttgaccaggaccttcacagtctgatttctttttgctcttggtccccaaagactagggctctatttagtcccctctgttcttgtaacattagtgtcttgtgcattttcagtgttttattgaacaaagaaatctaatgttctaagagagaagcttgctgaacagaaggttgcgtcaagtttgacaagttctgtgacataaggacttagcttgctttgtgattctcaaggtgagacagacatgaactaaacacaggctttatctttaaaagtggatttcaattttttacttttatttttgtgtatccatgcataggctctgtgtgtgtgtgtgtgtgtgtgtgtgtgtgtgtgtggtgcttctggaggccagaatagggtatcagatatcctggagctagagttacagacagttgtgagtcactcagagtaagtgcttagaaccaaacttaggtcctctggaagaagagcaagcgttcttaagtactaagccatctctttagccacagattttcatgttttacaaggaatggtgtttatctcctaaaaccctctattccctggaatacaattcaggacctccaacttgattgccccctgtaaaaccctgccagtggggtctgacagtattcctggtgtcctggtgataactcttggcttatgttgtgggtcctcctgcctcagacttttcgccagagcatgatcagcactgaagatgcaccacgtgtgctttagattgacagacaagttgttcttaggcaggcaaatgccatgtctgtaccaaaaggcagcaggtattgtgaagcctgaagcagtgagggtggccctccgggaagaatgcgacatagtcccagagctcctctacagtctaaatatggagattcaagtacatacttcctgtcctcatgtgtgaggcaggaagcagtaccagggttgtggaatatctagatagagcagtggccagatggaacagggctcagcaagtggtgacgatttagtcattatacacaggaatgaaaatgaagctgtagttgagggccatccactgaggttgtcacccccacctgataactttagaagcaaatccttgttcacaacatgtgaacgtatgactccagggcatctgcacagcgctccatgttcttcttcgcctccaggtcttgtgtgttgtctccttggaagacatacatttattcttctctccaagtagagcatccttgggtggagcctttcaaaggtccgttgtggggacagtggacattgatgttggagccagtgaggacactccctagactaaatctatgtttatttaatgtctgattctgttcctgtctgctctaggggctgaatgcagggttgcttaacttttctgggggcccacagggcttttgggaaatgcttaagccacccccaactctagaattcaattgcatggccctttatatttggagaatggctgtatgtaagacagtgcaggattttatattgtacattctacagaaaatagattgttcctttccctctacactcactgaattggctaaatcttttccacagtcaccaagaattctaagctctaccatggtctcctggtcatcttggggacagaggctcaaacctagtgccaaggctgcctttgtgaagtgcagtttatgctgttgtgtccctgctctcctccagcttcctactaatccacaggtgctccttggcttctgatggcatacagaagaagcgtgtttcagaactctctcctgtgccagggagctcctccccagcacacccaggaagaaaacattcttgtttctagaactgaaagaagacttttttttttttttgttattgctgccgttctattctctacaaagtcaggctcataaaaaagaatacaaattgcacccggcaactcttatcagcaccaaaaagaattgctactttcaactttattgctttaaaaagcattttagccttccatcttttaaaaacaatttaggttgggaaaaggaattagaccatgcttagaagctgctacagaatcaccttgggcacaatgtgaaggggccatggtgataaagactgatgctttaatgcagcatcttgaggcagtgtagccgtttttctcagtggatagccccacctcgggtctgggtctctggagatgaaagcgctacatgggaggacatgcctctgggggtgttatatgacccatcagttgtcagaagggactgacctgcccaacacagtcacctgtatccttcatcaggagcatctgaggctatgggtccctggagcaaagttttgggtgcaaacagcactttcacaagctccagtttgaacataggagctgaaggggtttgcaaccccataggagaaacaccatgaactaaccagtttcccccgagctccctgggactaaaccaccaatcaaagaaaacacatggtgggactcatgactctagctgcaaatgtagcagaggatggactagtcggttatcaataggaggagaggcccttggtcttctgaaggttatatgccctagtatagaggaatgccagggccaggaatgggagtgggtgggttggtgaaggtggggatagcggattttcggagggtaaactaggaaagggaagaacatttgaaatgtaaataaagaaaatagctaataaaaaaaagaaaagaattaaaaaaaaagaaatgcccttgnnnnnnnnnnnnnnnnnnnnggagggaggaaaatgtttctaatcagtctggacttttcttggcttgtttctgaaacatcatttgaagctggagttgaacagcaaatatacgagaaatggctccaagcagccacctgccacccgaggtctgtgtcccctgctctggagtggagaaggaccaagtcatttgattgctcacagcccacactgcagaggctggtggctgcccttgctaaagcagatcagggcataaataaactcagaagtgatttgttttattgtcgatttgggttctcaaaagggattttacgatggcgtccatgtggccaagggcctgaaagcctttcctgttcatcagcgagacaagattggatagaaaagccaggctcctgtggcctcccttcagggtccagcctgagtatcaatgggagtgagaacatgggcagccttatttggtttctgtgccttgcaggaggtgggaattatagatcactgattaaagtccaagtgtccatcagccaatacttgtcggcagtgcctggcttcacttctcctagttgatcttattaaacagatcgtgcctgcaagccgactccatttcatttttctgctgatattaacgtttcctcataaattgtccacatgtagcatattctctcttcttattacagtaaattgcatgtcctgcctagccctggaacctgtctctatttcatctgaaggaggcacaaatgatctataatgaatctctctcccccagaggctgcaagctgatactcctaccctctgtccagtttggaccggctatttatctcaaacttagacaaaagagtgaatggagttagtctgatgatagactggaaatcattccactctatcggagcttacatgtattgagtcagttgtggtttctttttcctaaatcttcaaaatcaatattctgaggcccttactgttttccctcattccatgctgaacaacttttcctggggcttagttttcttggattccttcataaatgggcccctgaactttctcgaggctgtagaagaactgtcagggaattgaactcatgggcaccagctgaatcaggaaggactggctgcttagagagagcccaggggaggacccttataaggacctttgtgcgtccaagatttttctggggcatctcagaccttggtggagaaagtaattggagccatgagaataatattcggataccatcatagtttcagctcgaggcagcctggaattatctgagagcttcaattgcagaagtgcctagatcacattgacttatagaaatgtctgcaggggggctgccttaattgttaacttatgtaggagggcccaggacactgcgggcagcacaatcctctgggcaggtggctctgagctgtaaagaggcaaggaagcatgcacttgtgagcgagccaccaagcagattccatggtttctgcctcaggttcctgcattgggttcctgtcctgccggctctcagtgagggaagtataaattaaacaaaccatgtcttcctcccaacttgctttggccagagagttttattgccatagcagaaaagaaacaaggatggacattgcctatgaaaatgaggtccaaagaagttctgtagacaagcctaagttaagcagaggtgtctgggctagagtcttcaactctttgccaaagactgagagagtctggggggatacaaaggctccaggcggtatatgatagctgctcatttcaggtttccttgttctggacgtagcttcccacactcagaacccatggtggccgattagctggttttcttgtaaatgggctcctacatcaatgaaatcacgcatcctcatccacccctgagtgtagacgatgcttttggtggatgacattgcacagggagaagtgtttctaaatagcacgtcgtagcaactgctgcagcgagtctttaagttagctcaatgtctgtccttgggagagtgccaggccttaggctccatggggggatgttctcaagtggtagagttaggtttttaaaagatgctaattgccgtcaagctttcattatcccaggctgccagtgttggggggggggcgcctagataagtggccaacaattaacgcacacataaattatcaatggcatttgtactttgtaaaataaacccttactgatggagctggaaagcttccatgtggagggttttttccactccatttactagtcctgcaggccaagataaaggaaaatgggcttagacctaagaacacgggtggaataatggccttgagtttttgagaacaaattagtttgggagatgaagtcagggctgtatataatggttttgtttcagtatgagaaataagatgcaaggaaacaaacaaacaaacaaacaaacaacatttccttgctttgttcccactgttgtaggaccaggcctaggtttgcaggataatatactttctcagataattgtttgggccctctggggagccatatgactgaggttggggcacacaagctggggctgacatttaaattcattctctgctaaatactcttctgcaaaaatctgggtgtacattagaactctcagtttcccacagtgaaataggaacctattgagattgttgggaataaatgaggtacaagggatatgaagtaggagttactgccctgaattatcctggaggtgccatacaagctagcccattggcctttgaaatgctcacagttgattctgtatatcagtctaaggacattagtatatctaggctgcagatgcatcctactgtgtgcttatcacccacatgctcttgcttccatatggaattgaacctcattagcatgtaatcaaggggcaactgccaatccctccccctacctccagcctcgatctaggcacaaggcttgcttgacccttgtcatttctgctatgttaggggactgcttactacccacagcctactagggagcctagagctggaacttagccataatctctttctctattcagactgtggaccagggtggccagaatggaactcacatgtctcatttctgaatgagctcatgggcttgtatgctgaagttcagtgtgagctatatcgaagtactcttgttaccattgacaatggaaaaatatactggagggtcacagcactcgcttgcttattagcaaggagactccttcctagccacacttagctttcccagggctgggaaggacagttgcactatgcttactttagcctacgtctacctatggcatcatattttcacctctggaggatgatgcgcgggtgatactgtatatgcccatgcaatctacacatgtctgagatgtgcctgcacactctgcctcctttcactggcctcctgtgttactctcctcaaccattccttttatctgtcaccaccatctcctgctgcctttctctgatcaaaaggactagaacacaataaacttggcccctctcaagtctcatctccttacctttagttcctaaattttgtgtttactgacaagacacactagtcaggcacatagatagtcggtttggcaacaccttgcaggattcatgataatgtaacaggttatctgtattgggccaaagctttgggccagaataacaactcctctgtgttcactgagacctcggacctgtctaggtccccaatctcctagctgcttaggtctctgctttgctttatcttaaggatggtagcaacagccacagttgtgagctccagggagaaacataaccaacttcccacttgatggatgtgaatgagagtctgctttgagtatgatgtcatctcacctccacctcaaacatacacctataggatataggagctgccatcgatttacccgattgagccagttcttctctgtagatgtctatggtgccatgtggctggagaatcctatgctgggcacgagaaaggaggtcctgggcttttctgaggcccagagaacatagaagagacaacacctaccacttttcaaagctgcatacactgtcttttttttttaatcacattttgaccctataatggcagagacacagcacctcgtagagtcatgtgtttcagaccgttaagacagatgtcaaggcacggatgacatttcttatctgttcagtggtgagagagggaagatatgaggaattatgcacttagaagagaccctgggataatgacaagacaggagaagcaggggaaggagatgaggaggacttctgcagtgactggtcatgcattgagctccttcctagatcggcgaagtcactaacacgtaaagccatttgattcttaacattaccccagactggagctgttcatttcaggttgggaccccagaagcagggttcaaaaggagggaatcagatgacttgtaattaaaaaaaaaagtgttcctggaggaattcaaacaagaaagcctgcaggtacatagagatgtggaacaaggaagtgaaggatgccaggtgacatcattgtgacctcactctgtagctggattctggaaacagctcagatgacacagagacatccctatctgtggcagcctcccctcttggttgggatataaattcccaagtaatcatgagtgccacgcatactctagcagcctgagtcttggctgctggtggtggagaaggaacgcacagggagtctgggtaatcaaatatctcactatgatatgaggggttttaggcagagtaacacagcatggttggtactcaagtgttgtgggtcacaaaaatgtgcttggaatgatgatccagatcaccagggagcacagagcaaaggctcctctgccatacttgcttcatgatgaacgtgtttctatctgccacaggcatatatgggagaagaaggaagaggttagcacttagaagggaaaccaggaatgctgggagcaactctgctgcttttggtctgtgagctggtaaggcttagcccacagagctgccagccctctggtaattgtgaagggaggccagtgtggttttgttcaatcttcagtagctgttcttcttaccacctatgccagtctcggcatgagctgcaccctctggaaaaaggctgtatccaagtgctatttatctctgtgtgggcaaaagaggcttaacaaattagctgatgcttaattggtgagggaaagtaggacagggaggttggccagttatcctgcagtttgccgatcaattctctctgccggtaccttccgtgccccagtctgataccaggtaagaagagttcttaggggagccatgctcccacacactccctaggatcttctagcaattggaaattggccattggcaatgctcgaacctctcagctgcaaaatgcacctgtaccttcaaagagctacagcttctctgggcgagatctcagttctcagggtcaaggtgcaagtggaacttggaaaggactagggctttatgcaggtggctgctctcagtgaattagaacccactgtactgaggccagagcctacagtttgaaaaactttccaggggctccttaactgcagcctaacttggtaatcattacaattgatgtcagctcagcactgagttgtgcctgtcaccctatggttaccctctgagccaccacttattttcaaagccactgttgacattgacagtaatgggatacttctgatgtccttactagctgagacagcctatttcttcttgcatcatttggaaaggtagaaaacttttctttcactgtgttgatctctgattactaaaacagttccctgtaaatctatgcttagatgctgcaaagagcaactcagactcttgctcaagccagttctttatttggttagacacctacatcatctttcctagtaagagttccttgttactttaagtggcagttggcttaaactgttccccttcatgactgggatttagagtgtggttccttccatcactggagtggagccccacttagatcagcaccaagagtagaaccaatgcctcccccccaccaccactaccactctaagcttttctagaagtccttagtctttactgtactgcattcaaatttcatctctccatttgccatttttgttttgagttcagcctcattgatgcctctgtggagattcagtttagcattccagcctttggggacttaggagaactccaagctctgtgtcatattctaacgagcatgatgtaaccaatgaccattatggaaacgtttaaaggttagtgattaagtccagcaagggcccagtgatgttttcacagtacttagataatgttcctgtactttgcccttatccccattgtcttagatgtctaaaggcatctgtggcagagaagagaggggttctaggctgggtagtcaagatcctaccctgaggttgtctccagtcaacactggtaattctgggtcctcaagagacactgcatcttgggtcctataagcttctctagagacatccggtcttttcgggcttgcagatgggatgggaagtgtctcaagagatacaccatgatacatagatgccttttgtcttgctgaggttcacctctttccaagggcatagaccagttcctcagagcctccttcctgggttgggcagggatctgtttatcccaggaaatataatgttcatggagtaaggttcatatagccaaaggatataggatagatgtgagcgaaaggaggagtgaggatggacctttagaagactaaaatgaccatctttctatctctgcttcctgtgagcttcttgggacatttatggaccccattctctgaattttcctcttctgggttacataggtttgcacactggaaaggaacagctgttatatattttctatacatgacaccactagacaaatgatagtgggtaggttatttccttctctttcagactcttgcacaggttcatcttttcatggcctggtggcctctcattcatagactatagaggtcagtctatattcttcatccctgagtggtccaggaaaagctctgtgcctgtgcttggtgtcctgcagttgtctggtaaggactgataggctagcattctcctgggtactttatgttatatattctcatgatctactgtgttccccaatcaattttgttatttccatggagtacagccccaacagagctctgtgctctgatagtgtgggtatctcagtaccacaaaagcccaatgctctgacaccaaccattacaccttctttgttaagaacaattacttctgtacttactgataagaaaatgtaaatctgatatatcaataagttagtgatgagaatttttacctgatatgcatttcccaatgtgattttaattaaaaacatctgtctgatatacatgtgtagatatgcatttgcatgatataactgtagaagcttctggaaggggccacttcagacaatttccagtggatgaatctggctgaataaaaggagaatttttagtccatgggcacgttctttttaaaaaagagaaagtattatggagagattttaattaagcatcttaatttgcctatatttttaaaatcaaaagagtaataaaaattacattaccaaaatgtgaaaaaaatgtaaaaagcaaagaagtaaatctgaaagctctttcccaggttcatcgttggcttggcacagtgcctggtgctcagcaagttcctggcacatgctcaccgcgagcatccttacaggacatgcttgcaaaccatcaatcccttccagctctttcagtctgttggctttccaattcaaggagacagaaagcatccataaatacatacaaaagagccaggcattgtggtgcatgtgtataatcttagcccttaggagtcagaagcaggaggatcaggagttcgggccttgggtacatagtgggtttaagactagcctttgctctattgaagacctgttcttatataaaaggcaaaaaccaaaaaaataaaaaaaaaacaaaaaacaaaaaaacaaacaaacaaacaaaaaacacacacacacaagcaaacaagtttaaagtatgcaaacaaaacgaggatttttctctgccactgctaccacttattcacatataagctatggtatcaaacacctactatatgttgctgcagagcaaagttctgggacacagctctctcctgagagatgtagacctttatcttgtaaggttcccacctaacctggcagagaaaatagacagtaagaagttataaactggtagccatttacatgcaaaaatggcaagcactgtgacaaagcagtgtggagagaaatgtggaaatgggcccctcctctatagctggaaaagacccagcgccatagatcctaaaacatgaatgagaagcagcaccacaggtgagccagtgccttctatttccctggtgttgctcaacatagctaggtgagctgccataaatctaacgttagtttcctcactctgtagttttgtgtagtgatgaatgttacctttaagtgctcctttggaaaggaatttaatgctttcttggggaagggaggctattcctgtaccagtggctgtggcgcctgcaggtctaggacctctaacctcactctaggctggtgtggaagaacatgggagaacagaaggtgtctccagtgatcaaggcatccagagtgggctccagggggttggcatgttttgtgaggaataatttctttaaaacaaacggtatttataaaactttatctcagcaatgatcctgcgtgtctgctagcttttgtgttgctcctgttcatgtacgttctttttctctttgcaggctgtggagaccaacttggcttccaaggacagccactgggtctttgtgaatgaggtaagaaccccagaatggtgatgggtgtggcttgctctgacccctgtcccatgggaaatctcagaacaaggctttcaaatccaaacctgactttgggagctgaaatgttcctggagttccattttgcaaaggcgagaggtcagagaactgggcttagcctgccaagatgattacctggagtaggtgggatctagcagaggagtccagagccgagtctatgaggctgtcaaaagtcagagaagtggtttcagactttccataaaggggatgaggtgaggcagacagtcagttaggagccagggcctgggagcatagatcaggctataagataaatacagatggcaggacaaaggaatcagaagagaatagaggccctgtctcatgcagagtaatacaagtatgtgagagtattatgtgagtgtgtctgagtgtgagcaggagtatatgtgtttctaagagtgtacatgcatgaaaatgtactgatttaaatgtatgcacaaacatatgtgtgaggagctttctgcctgagtgtatgtggtacaggaataactgagtatgtgtatgaattgtgtgcatatgagtattaatgtatgtctatattcatgagagtctatgtacaaatgtctatatgtacaggtgtgtattgtgagggtatgtgtaggtttgtgagtgtggatatgtgaatgtatgtgtatgtatgtgtgtgttgtttgtacatgtgacttagtctggatgtgtgtgaattgcattctatgtgtgaatatgtgagttgtatatgtatgtgaatatatgcatatgagtgtgtatatatttaatgtgcacattagtatagttgggaggctatatgtgtaggaataatatgtgtgcatgtgtatatgcacatgaatgtacagatgcatgtatgtatgtgtaaatatgcaagaatatatgtatatggttatgacatctgtacattcatgtacgtgtataggtatatttgagtgtgtgtgtggtctgtgggtgtgtatatgtaatacactcatccaaaaaaggttagtaggaagtgcctttaggtctggccaccccactgatttggcctcaggggcgaacaggatgtcattcttcagaaataccaccccgccagcctctgctgaagctgtggcacagggtgacctattgtcatatggtcccagcttttctgaagagccctctgcccacatgctctttcaggaagcagagcccaggcagcctgtgtgacctccacatgctgtttcagtaaaagcagacatggaagtgtttcttggttttgccttcagtggaggatgcagcctttagctgctactaaattagctgatcaatttctaatggtttcattctgaaggatctagggtttattatgtgggtaatttcttcttttatgatgtgtatttcttcattagtgcagtgctaatatggctgagacccattttgggtagctgatgttaataatggcacaggtagtaccacatgctagccgcttgtgaggcccactgctgatggtttcctctaggaattcttatctcatgagttccacatctacaagggccagccagggacatgcagtccctgtgtatttcccttggggcggttccatggctgtccaggcaattagaagggggatgtgaccacccccaccctgctcttcagaacctgcttgaggcttcattgatcctcagcaagttttgattcttggagctttgctgcttctctgcaggctcttcaaagccctatgtcctttgttccagtgaaaggaagcgttccatgtgtccctgaagtcaaatgtctggtgctggttttgcgctttttgatgactccgccacagtgaatagccagtgctctctgtagccaggcttcagaaaccagcctgttttacattttaaagacttctacttccctcttctgcatccctgtcatccccaggatgctctgtctctccagcctgactccctctctagggccaatcttaacttcagacaccacagtgggaggtgctttgtgggtactttccactcttaggcacccaggtattttggaggaagcttgaacccaaagcttagagtgaccaggagacaggtatagaatggggcactgtagagccaacatagatcagccacaggagcaggtctctgcagtaccacagagagcacacactcaccttggctgcccagaaagaacagataggtctaagaatcctgatgtagccatgtctttcttcagaagtgagggggtttggggagccccagctcccttctgtcttgtttcttttccaggaagcctctttttcttgaaaggcacagggcagcagcctccattcctgatcacttggacatgaccggtgcttgtcagtcactttacccttgctgaccccattactgctcactggtagccccgctgacagttctcatcatccctcttttacagacagggtgatagaagttgcaggcattgaatcaatttcttacagtcagacagacattctatgtggttggtgggattcttttatccccattttttgtgtgtgttatacacatttttgcccgtgtgggtatggacaggtgcatgtgtgtgtggaagcctgaagttgatgttgggcataaaccacaattgctctcccaccttattcactaagcaagaaccactcagtcaaacccagagctctctgatgtggcctgtctagtcagcttgctctagggatcctctttctgccttctgaggcaggaattacaaagtggtcttccatgaccacctagactttatgtggttttctagggaatctaaactcatacttgcatgacaggtgctttgatctctggaccagctccacactcctgctggagaattctttatgaagatcagctagctctaaagcacagtctgtcggtgacatcatggggctaatggctttggcaaagatccagcacttgtagtcagaatcttctgaaaagccaatcagcagggctcatgtatacatgacagtggggacgctctttggcttacctttagccccagcatatgggcattcttgaagacttcactccaaaggtagagattctgataaagtcttgaccccaaattctgatgtagcatatggttaatgacactaatgctctctaaatgacatgttagtttacctacagggccagccacattgagagtgttatttcctgtttaagtgtggtcccaaagtggggcaaaagctctattcttgcagtgttgtaacattttaagcactgcaaagttcaagctagttaaacatagagccacaaatagttgctgttctttgcattgtatgtagtaactagtaataaaataagggaaaataattaaagaatcaagggatcaggcatttgataaagactcaccagcttcaacttgtgtgtgtgtgtgtgtgtgtgtgtgtgtgtgtgtgtgtacaggtccatttgtgtacaagaaaatgtgcacatttgtaaatgtacatgtgaaggccagaggccaatatcaggggttgattctcaaatgccatccatcttgatttttttttttttgaagcagggttttatattagcttggagctcactgtgcatgctaggctgtctgggcagtgagccctaggaatccatctgtctctacctccccagagctgggattacaagtatgctaccatttttctatatttgattgctttatgtgtttttcttgattcaggataagcattcaaggccacatgtttttgtttggattcttcgtgtggcggttttcttaattacatctagttgttcactgctgagttttgttgtatattataaaccttttcatgttgtcatttggatttgattttgagaagagacaattggcttctgaatttgtgtacctctctgggagattcagtgactctctgggttctactgtgagacactggcaaacagatacagttttgttataaagtatatgtttaattgattgattaagtcataaaaacatgtgagaagaaaggaaccattagaggagcaaactgtgagttcattgaggatatggccgtatctggctcatcaatgagtctttagtgccctgtgtcaaaaatagattggtgcaaggagggactgaaggtaaatcaatctagacagtgacaagcaaattgcattgatgagcacctcacagttggtatcagaggaagaaagcaataactaaagagctgagcctccgagatggggttgttagtttatgctacttgagcctggatgtgttggatggcctcctctgtcagctggagtgagagccctctctctatttgactccatcacattccaagtgagaggtctttatggtttgtccactgacatatagtgtccttagtgcttcctagactccgtgcaaagaagatgaggccttcccataaagctgcacctacgcaggaaacatgtactttgtggtctgtcctcttaggaacgttctgcagccaattgtatggattgtgtagtgttaccgtcaggcttctgaagggctccgtgtgataggaatgttgactgttcaatctgaggcgtgacagcagacgcctttggacacattcttcctgacttacatccattacacagttggatggaaacgtttaaagattgtcttagtcagggtttctattcctacacaaacatcatgaccaagaagcaaggtggggggggggaagggtttattcagcttacacttccatactgctgttcatccccaagggaagtcaggactggaactcaagcagggcaggaagcaggagctgatgcagaggccattgagggatgttctttactggcttgcttcccttggcttgctcagcctgctctcttatagaactcaagaccaccaggccagagatggcaccacccacaaggggcctttcccccttgatcactaattgagaaaatgccttacagttggatctcgtggaggcatttcctcaactgaagctcctttctctgtgataactccagcctgtgtcaagttgacacacaaaaccaaccagtacaaagatgttaaataaacactgtagatgcacatgttatttgagctcagtgatagtaggtggtcagtacccaggaaaaggtaggttttcaggagcagggaggcctagttagcaggccatcaatattattctcccattgtagcatgcaccaataactgtcatggccttgttcatcctaactcttgttcttaaagctctagactcagagacctagctgtttttctgatgcttctccctcctgccacagacaacaatgggagcctatttctcatctgaagatcagcatgactgtctcagaactacttgtccttccccaaacctgtttcttgctagtgttcttgacctcagacagcatgccatgctctggatgactccagcagtagggagtagctcacattatgctgactgcataacctgctgcaggatgattctatctcacctttccatcattttttatttctttccattattctgttgtgtcatgtctcatgtctataggagaatggtgactcctgttatttctgcttcctggtcaggcttttctgtcttctgtcctcttcccaagctcttactatgctgaattccttacagagctctgcattgctagctattgatttacacaccacttcctaacagcctgtgagtgcaggcctgaatctcatccctacccgtttctggaactgctagtgtgaaggattcacctgaggagtcatttcctgttaagcctcctccctacttctgcttgcttccttcaacttttcttgtctaattgcctaggggagaaagaggcattgagaaaaatccagtcttccatggtctagagaagtatgatgctctgctctgtgagcttcagctatcagatctcgtggaggcatttcctcaactgaagctcctttctccatgataactccagcctgtgtcaagctgacacacaaaaccagacagtacaaagatgttaaataaacactgtagatgcacatgtgttacattgtacctatttttcctcagcatgcattattaggggaaaacactgtttcatcagacctccatcaaagctccacttgtcttgggtggagtctctggcctgcagtggagtagtcagagaaaacattggtaaaacttcctgcagaaactctggttcatatactgggaagctttgtgggaatgggtgctgtgatcaaatggcgagtcgctggagaggtaaatagtgtggccaggcacttgggaggcagaggcagaagcaggtgcatctctctttgaggaccagcctggtctacagagtgagttcaaggctagctaaggtttcatattgagaccctgtcgacaagcaaacaaacagagtaaaagaagtagaaatagccatattcttcagattttctgaggccagggcacatcatacctttccgtatacaatatagtgaacactgtctgccctgtgtacttgatctcaccaaaaatcttatgtgcttttcatctccacgtgctcaccttcactagagcaggttatgtgcaggtggtacaggaacagtcttgaaaggaagtcctgtctgtggggcttcttcaactagaccttaagacgattctacactcaggcagatgtcacaccagcttgtggacctcttcggtgctctctccctggaatattgtctacactttttcctcaagccccaccccattgaattcctttcactggtggctgaccaatgtgaggatctctggagcagtagagaaaaactctgtcagcagtccaagaggtatcatcagactttcaagagttccctactcagaacctatagttaggtaaaggcattaggttatacttggttactatggggaaaggtgctaaaactaagtgaagaataaacaaaagcacacacaaaaggagcacatggagaggcagagcacaccaaagcagactcccacatttaagaaatctctgtttagcatgcacagagaagagggttttgcttttttcccttccatttggaagattttaattctgtttgaatgttaagtccctggactatttgccatctttcattttaattccatgtttcttaaaaaccaatctatttgttgtaatctcttcacttatttcactccatagctgcattgagaagtctttgagaacacacaccacatcgtacctatctctgtgagcctagctcagaatcccagaatgaagaataggtgttgtcatttatcagacagtagctggagccaagagctcatttcttacatttgttaattttggatgtgaatgtgtgtttgttgcacagtgtgcacatagaggtcagacaacaatttatagactcagttcttcctctgtaagtacaggggatacaacttaagtcatcagggttgatgataagggcctttactcactaagccatatcgctggccgaatactgcttttgattatcacttccattctttattataaattgacagtgttagtgatctttggcatacaacaaatggctatatttaaatgtacatattgagattgacatatgtatacattcataagtcaaaatttcaatgaagatggtaaacatgcctaccacacagagtgtccttttagccaccctacttctctctgacctttataactcattaggaaactgctgatctgttcttggcattatactggttagttttattgtggagtgacataataaatagttatgagtaatgagggaatctcagatgaaaagttgcctctatcagattggctgatggccacgtctgtgagagattgtcttggttgaggagaagtataggggaactgagtccacatgggcaatggcatttctcatcaggttggccctggctgtctaagaaaattagctgaacatatgtcagtgagcaagccagaaaatgatttgtgtaaactgaacaccagtatattttcttcattttcttttgtatgactttattcaagcataggtattttaaaaatataaataatttgttttctgaggaggaatattcaacagtaccagtaagtcacattcatagatggatacttcaagtctagatgtttagccagtacatatagtgctattagggaatgacttggtcactcttctattgttgtaaagacacactatgaatgagacaactattgtaaaagaaagtatataattggtggatttcttatagtttcagaggtttagaatattattatcatgccaggaagcattgtggcatctaggcagacatgggagcagtaagaactacatcctgatttagagagagagagagagtaagtgggggggggaggaggagaatgaatatgaacttggcatgggcttttgagccaaccccccagtgacacatttcttccagaaggtctacctcttaatccttataatcctttcaaatagtgctactccctaatgactaaacattcaaatatatgaacctgcagagttatctattctcattcaaatcaccacattccaatacctggccctcataggcttgtagtcatatcagagtgcaaaatgtattcagttcaacttcaaaagtccccatagtcactcacagtctcaacactttaaaaggccaaggttcaaactctcttctgagactcatgacattctataagccccataaaaataaaaatgagaaaagcagagctatacttcaaatacataatggcacagaatatatgttacattaccagttcatctcctttctgttcttcatggcttccttcactgcttaatctttttttttttaatttgtttttaagacttgaaagcttagctgtgtggggtcttgtcctgactcaccactccctttattccatttagcatagcctttcctttaaacatcttacttccttgagcatggactttggctccactacacttcttggtgctcccggtgttcctttttctcttcaaattatacattttgtgtttttccttgctcagcttgctccttttcattatacatctgcaaaagagtgaccactaaaaaccacatgacctactcgatattaggctgtcttgaaatctcctctgccaatcccattaatctaaaagttttcactttagcttcaggtagatttttaggacaaggataataagtagccacattctttgcccaaatatcataaaaatggcctttaggtcatttactgatacttttcccctcagaaacttcttgagatgagctctcacagtccacattgtccttaatactattgtcttccatgttcctactaggatggccctttcatcctcacttatagattctagccacttttttagtccaaatttccaaagtcttccatgttcctttaatagcatggttaggcctgccacagcaataccccactccctggtaccaacctctgtcttagtcgttgttctattgcagtgaaagagcactgttacacgagaaagcatttcactgggggcttccttacagtttcagaggtttggtccatcatcatcatggcaggaagcatgacagtatacaggcagatgctggagcattagctgagggttagatgcttatcagtaggtagagaaagtctggttctggttgtgcctttgaaacctgaaagtctactcccagtgatacacttcctccaacaaggtcacaccttctaatctttaatagtgctactccttaatgactaaatattcaaatatatgaggctgtgggccattattattcaaactaccacagagatatacataataggtctttgcatagatatatgctttcattttatagggaggcacattcttaaaattgagttataggtggcatctgatggttctcattgtagtagtttaagttttaatttccctgaggactaatgatgttgagtatcttttttttcccttcccatccttcctgctttcctgcactttctcccttcctgcttctttagctcttcttcttcctcctttggtgatggtaaaagccagggtcttttacatgctagacataaattccagtgctgagctatctcttcaagcacatatctatagatctgcccaagtaaattatttgcttaaacattttgcttctatttgttgaattatatcttttaaatgagttttgaaagatacttacatttttatacaaaatcctttactgaataaatactttgcagacatttcctgctagtcggtggcttgtttttttcattataatactgtctttatgaatgacagaccttattatgttgatgaagtgcaacttgtcaatttattcttttgtgggttgtgcttttaatgtagtaacagaaaattttcttaacattttattctagacagttctgatttttcttttatctttataccaattgcacatcctttgacttacaattattttatagtaaaatttaaaatcacagtttttagacttctatcttctttttaaaagttgttttagctacattaggccattagaattttctatatgaagtttagaattagcctgttgctgattgaacttgtcattaatacaaaaaatgatgtttgggttttcacgtgtgattgcatttaatctacaatagaattcagagagaattgccatctcaatagaattgagtcttccatcctggatgtatttctctccacttaattaagctgttttaaaatcttctgaacaatagcttattgtttgcagtgttcagatcattaatatttttgttggatttttatgtcaatattttatattgttgatcaataccattgtaaatggtatcttaaaaaaacttcaatgtctaattgttcattgataatacatagaaataaaattgaacattgtgtactggtcttgtatcttgggatactaacattgatacatttaataattatagcacctttatatacattctgtgacaattttctgcattgactgtctggtggtttggaaatgcaacaacttgaactcttcccttatgtttggatgcattgtgtttctttttctttcttgactgtgttgatcatcacctccagtacaaggctgaatatagtgctaagataatgcatcattctctgggtcttgatactaagaagaaatacaatgctgtgccattaagtgtcatgtcagaagcaagttgctcatcagtccaagaaggtcctcctctgtttctggcttgctgaattttggaagaatgcatgctggattttgcatacagctcttactgtgtgtattgagatgattaggcctctttaatttttttttttttagtttgttaatatactgaaacacatgaactgattttctaatttaaattaaccctgagatgagacttactagttataatatattatcttttgtattatatttcaaatttcatttgagaaaagtttgattagaaaatgtctcctgtgttcataagggatttcggttggttcttcttccttctaatgcatttcttttgttttaatattgcaataatgatgtcttcagaatgtgagaagtgttcaattctagataattttatgtagactttttctttgtgtggctgctaggctttgtttatgatgccagaaacttacagtttacattgttacagtgtcatagcaacatattattcctctttggcagccttagagctatattttcttgattgaattttggtaatttgggttactcagagaattcctccaaatttcacagaagttgtcaaacttagaagtatacagttgatgtttcattattttttttcacattggttgactctttagacacgagactcttttatttttcatatttattgcttggacctcttttttgtttctctagatctttctcgttaattggtgttaattgatttcatcagttttcctatcttattgatggttttagtagtttttctgtttcctttgatatttcctgtgttcataaatgatttattgtttagctctccctgctttctccctccctcccatcctcttgtttctctccctttcttttgcttctttctgctcttgtctttattgcttcttttctgcttactttggcatcctttgcttctccttctttcagctctacaggtgaagttgaggttgagttccagtgtgtctttagtgacctatctcccattcagtgacttagtgtcatcagatacatcttgatgtattatatttcattattgagctcaaaataccttctatattggtttcttctttgacccatggattatttaggagtgtgttattttgtttgaatttgggggggatttttcagtgatcattctgttatccatttctaatttaattctggcatggtcagagaatatagttcttagtattgtgatacttttaaatttagtgagactgatttatggttcaatgtatcgcctttttctttggtttatgcttcaggagagttgaaacaaattataacctggtgttgcattcagcagcctatacatgttaatcaagttaatttggttgatagtttcattcatcccttcaatatctttgatgatatcattgtgcatttgttctattattgagagacttattaaaatactcagtgataattgttttttattccattgtgcagttttagcagttgttacataatatattttgaaaccttcttactagagcataaacatttagattttcttgattaaattgatcctaaatcattattaaatgacttcctttgttctctcctctaaattatactttgcttgctgatagaacagccattcagtaagacttgaaatatgaaattattccttcacccatgaacttcaaatggatgttgtgtcagcaggcattgaaaaaacattgatctcattgcatatctccagcaacactcatgggtgaccaggtacattgtcaacgacagtggtgttttaaaaggaatttttttcttgaagtagttctgaattatctaaataagcagttaaaacaagccaacaggccatttgccatatgattcacatacatacgtacttatatacacatatacatacatacattcaaaagaaatgagatcaataaaccccaaagatatatacaactccacattttgttttatactattaaaaatggcaaagataataaactaatctaggtgtatatgattgaatattattagcctataggaaaaacatcgaattctggggccttgggatggcttgacatataaaggcttgcctccaagactgacaacttgatattaatcttcagagtctacatgatagaaggagaggaccaactgctgtggcttgttttctaaccacctcagatgtgccatagcacgcctcctccatctccccccacacaaatgaatacaggtaataattaaaagaataggtttctctcatttgtagataatggacacacctgggagacattatgttaagtgacatacaatgtcacatctatttgaagtagaatggtaattaccaaatccaggaagtgtcaggtgtggcagaaaagaaaaaaaattggacaattgataccaaaattctgtttgacagaaggaagttgtgctctgctgcagacagaagggatgttcacaagtacctattattattttatgataatgcagaagagagggctgtaaaaacttcaacagaaagagatgataagtagagggggaatattgattattcgtgttgttttatgtgtctacacatcatattttacaactattgcaagttaatcaaaaactacaattgagctacaacataacagaaacaatgtgctgtaagcaaacctgtttatgttggtgtttttgttgttttacttatggcgtgctggcagagtagatagagtataattcttatggctgtttggatttctttttaatgatacatgaggatgtatcttaacttcaagttgccatgtgcattagcccccaatataaagcaacttgtcctgtgatgccttgaaggcagacaccaagccctctccagctaggatgcttggatggcatctttctccagtaggaagttgttctgtctgcattgaaaatctgttgctcagtgtagtcaccattatcaggtatctgtgtttaacttgctgtagcttctctaatgatgagggagcacctcattttgtatgttgatgttacagcgatggcttctctccttaaaccccacgagctaatctctgcttctggtttttcttttggaacttccttctccatctgctgtatcataggactgaggagaggaaccaccctgttctcagtaggctttgtctatatgttacatgtaccaaaatatattattattattatatattgtatatattattgttgtactccaacaactttaaaatggttagaagtcacaggaaaaatattacgcactttctggtgttgctaccatctctggtgccttacctctatgcagctctgtatttagagatggcatcgttttcctcctgccttagaaatgtttagtaaggcagctgggccggcactgaaagctctcagcctttggtgtattcaatgatttttttatgttttaaaaggattttatttcattttttttatttaaaagctattttgctgggcccagaattccccagtttgtattctactgctgtgataaacaccacggccaaatacacctcggaagagccagggtttatttcagcttgcagctttcagtccattggtaggaaccttgaggcaggaactgaagcagagatcatggaggggtgctccttactggcttgctcctcacagcttgctcagcctgccttcttggataacctaggatcacctgcacagcgctggtgccacttacagtaggctgcgccttccttcccacatagatcattagtcaagaaaatgtcccagagtcatacctatggagcaatctggtagaaggcctttctcaactgagactcccacttcctaaataacccgagctcatgtcacattgacaaaactaaccaagcagcatgtcagaaatccgatgccaatccttgctttggtttcattgttctatatctcttcagtctttagggtttcctgtctctcatttgaatttcattatgtgtacctttgttttttttttccacctcagtctctattatttaattgtgtttgtaatttttttgagcttcttgtacttgtagatttatagttctcatcaaaactttcataaattgtctcttcaaaacataaaaatgaaattacctattatttcttcaactctgttcactgcatccccactctcttacttaaggatgtctgttacacacaaaatagggctttgcagttatctcccacattacagaacttctttctgtttttatccttgtgtgttacattgtgtgttgcacacttaccacaatgtgtctatggaaatcagagtccagtgttgctccttgccatttcccttgtttgagacagtgccttgtactgttcactgtggcttgcaccaggctagttggcttgtgaacttccagggatcctcctgtttgtatctcttacctcgccactgggcactgggattaaggacatgcactcgtgtgttcagatgtgtgtggttctgcggatctaacctcaggccctcatgcgtgcgcagtgatcactgtgtttgctggttcatctccttggtccttggcttcattctaattcattttttcctctgtttctcattgcataatttttaccatatgttacagctttaccaatcttttcttctatatataacctgccaatatttctacccacaacttcagcttttaacctctacgactttaaacagagactttaaaaaacctatactatgtcaagaactgcttaaggactggtgtctgctagactattttcaggttcagttctaggacagtgtttattaaatgaccgttttcatttttgcttattttattttgtacttcttttgtacatgaataagaatctttacttgaagaccaaactttgtgaattgtatcttgtgagttgctgggtgtttttgtattcccccttttaagatatagttcttaggaaagacgtaggtccacattggtcctcttgaccctttcatcagacactttctaagttagatgtagtctatggataattatcccatactcgtgaggctgtactctctgggttcttcactttatgcacattttcctcaagcccatgtaaactcctattggttggttgtttcttcctaatccaatgtcttccaaacaagcattttgtggtgagtactctgccaagtgtcaggaggacctgtaggatagagccatgttcttcatacatctgtgtgctccccagtcttcagttcagagaagcctctcccatatagtgtctcagatccataacttaatgcatggagtcccttggcttttgtttgtctcctcttacctgcttttcagtgctgtgataacctcctcaaaacagcattcttatggctgttttgtctcttatcttgaaagatccctactaggcttcttgcatgctgttcagtattttgaaaactgttaccttcttcaggtaagggggatgttgtgttgctgcttgaagaataaaattaggatctggtttggatgtgttcatcttaagacatctacttgagggcaaccccgcatagaagtacaggcgtgttgtcctgaagttcaggaaagggtgattctggtggcttgggtttgggaaccatttgcatatagaggattcatcatctagctggaagagatcaccagggagtatattagttaagatgaactcaaacattgaccattaagatatatattaagccacagcaaagggaagaactaaaaaggagtctgagaaggagcagtctgcattggagaaaagaaagcagtcatagagccctggacaccaagtagagaaatcatcaccaggagagggagagaagccactaatgtcaggtgctgttggcaagaaggttcagtggcctcctctcggcggtgattgttaggaagggtggcaggactgagtctcttggatcctaaactattcagtcattcaaacaaggagaaagagatataaagattgacagatatattagtgccataaaagggcaagaccagcatctgaacttagatcttcatgactcaaaatataagaattatatgccctgtatcatactatcttttcttacttctcccttaatacacagccctcatggaatgttgaatttcactaaatcccaggaatatgtgacttttacagtaacctggaagaagtaatacagatattgttaaggggagccttactatagaactttttattgtttgtttcttttgttacaagttctctttatgttactgtgtatattgccaccttattttaaaaattgcttatggaaaagacaaaggaacctcccaaaagcccacagaaataagctactatgtaccttatgggaagactctgagggaaaaaaggacctggaaacgcactgttactcattcatcagaatgagcccatttcttctttcatctctaagtgaatctgtaagacttgacaattacggtgacaggcgtgtgagggttattgttctgcaggtgcctttaacgttctcagagcccattgagagggcattggaatctacacaggtggtgggtttcggccgcaggacagaagggctgttaggttctagctcacagtctttgggactatgcatatgatcttggctacagtactcaccacatgcatgaccttggcttggcagattgttttctctgcttccacagccttgctttcctcttctgttcataggactaataattgccacgtgccggactccggtggttgggttgacatacaggatatagctgagcatggagtcaaagagcaagtagtctcaaaacacagttcccttcattagcatttcaaaggtcattttgcctttggtcttaataaagaaaatacccagtgtaaggtcctgattctaagtgtgtgcatttctttataatgcgcacaaggagagacttgatccttgtctgggtgaatctgagctgaggtgtcttagcactgtatcttgagcttgcaacccctatttctatccctgcctctcaaaatcctatacaacttcaggaaccatacattcccctgacctcacttactgatgatacctttcgtggcctttccaacactctggaggatacaaactcaccctttgtatcttgcctccctaccatgacaaaagacacaactcattgtgtatgtactaagttgcacaggaactctgaggctgctcctgagaatctgagagctggtttccccaccctcagacatcttgaaagttcttaagtagaatgcagatgtccacaaatcactaaaggacagctagcaggagctgtgggggccttttcaagccatctgctactcaagttgaattttcctttagacagaaaacctactattgctggggagtcagactccatgtttttagacgtgagtcaattgttctcaacaaatgtattgccattttgcagagttttgacagaagagtgcttaggaaagggaatgcagacacttaggggtatttaaaaatagctttaatcaccacgtgcagcaaatgtatctgaaaactaaaggttagtgtctacctttctgcattcctatccatcgctcttcccacaaatggattccaacagattccgatgaacttgctgctcatgccagaaaggccctattatctgtgtctcctaccctgttattacacctcctttgccaggcttgataatcattattcatcacgcagagaaagggaagtgagcacgcctgcatgcatgcacacatatacacaagaggctgctgcctcacacacagcatggggctcacaggcccctggtggagctacccatgcaggtgccatttaaagttggaacataagcagaaacagtcaagagagagttcaaaccactctgaactgagcagtgttctgcctgatgtttgggagcttgcagagagtgtcttcaactttggttctttttttcttctacttcaaaccaggagacattatgcatattgggacagcttgtcttttaaacctgcatagagaattccaagggaatgccatatgccattagaaagggcagtgatgtctacagccataccactcagatcatgtttgatctgagaagttaattagggccagaccactttagaacatgcacgggagaaaaggaagcaagaaaattgttcggtgatcagtggtcagaagcagaaggtccccatagcaccaaagaacagtttgttatcttttcctgcccatggagaagccagctgttttgaccttcatgcctagcattcttcttgcttaagaattgctaaagagcttaccttgtaaatctgctggggtctgaaaaccctcttatttaccaccaatttcacacttctcatagtatgcatgtgctaggttcttctttggattctttatagacaattaaaaacaaaacaaaacagatgaaacaaattgagctaaatacttggaggaataatggcaaatttgatccccctttaatggactttgttcttttctgatttcatgaaagttatataagagattcataatccagaccatggggatcttgggtgggctgtagatgctctctaatctcatgttgtcagaaggagaagaaagcttgtctcacagatgtgccacatgagagaatggttctcagtgctttggaaacacaggtaacattgattatagctggagcacctgccttcccttggcgctcactgtgacacagagtgcatccatgcattggcaagacagaatagccaaggtctttctgaggttgcaagggtttgataaagaaatgggagcattggctttgacagagccatgaactagatgttggatttggtgttagaaaggcctatggtatggttttcctttgtcttattttttggaggggatggaagaagtgacaagggtcaagtgtgtccctcttgctggagcactgtctgcatcattctccctctgcatgtggtgtgcacaaagctggccaaagggccaggcagtatgagtgtccccactctgtgcaggtgagggaatactcttccttgctgggcctaaggccatggctctccattcctggatgatctcccaggttctctctcccttggtgaagtttatccctctctagtctctgccatcctgccccttcaccacctccatccttctgtcaatccctttgtccattttccagttctcattaagttacattgcttcagtttcctgaaattagagttactctcagttgtccatgggcagaatccatgagcagtacagggtggggcagaggagagaggcttgcacttcttctccaagttcatgatggcactttttgctaagggatgactgtcctgacacctgtaaaagtcaagctgtctctagcacttcagtcctgcctggtgcagagtctgctttctggaagacaacaagagagtctagaaggccgaggggaagttcaactgatggcattctgatgtggcaggtacccaagcatgtaacaacggttctgaaccctcccacttcttgtccttgttcttcctgagactttggtaccacaggagaactaaagaacaaaactataggcagttcatggcagttaccaccaccaccaccgctaccaccaccgctaccatcaccaccgccaccataataaaacagactgattgagtgcaaatcccagtaattctagctaccatttaatatttatttatttattcatttatattattatttactattttgtgtctctgtttcttgcattgtccatttaaaacatgaaagtctgctccccttgagaatcattatgaaaagtaaatgagagaaaaatgtggaaggcgtttagaacagcacctggctattaaggatagcatcaatattgannnnnnnnnnnnnnnnnnnntcttcttgagtttcatctgttttgcaaattgtatcttgggtattctaagtttctgagataatatccacttatcagtgagtgcatatcatgtgagttcttttgtgattgggttacctcactaaggatgataccctccagatccattcatttgcctaggaatttcacaaagtcattctttttaatagctgagtagtactccattgtgtaaatgtaccacattttctgtatccattcttctgatgagggacatctgggttctttctagcctctggctattataaataaggcttctatgaacatagtggagcatgtgtccttattacaagttggggcttcttctgggtatatgcccaggagaggtattgctggatcctccggtagtactatgtccaattttctgaggaaccgccagactgatttccagagtggttgtacaagcctgaaatcccaccaacaatggaggagtgttcctctttctccacatcctcgccagcatctgctgtcacctgaatttttgatcttagccattctcactggtgtgaggtggaatctcagggttgttttgatttgcattgccctgatgattaaggatgttgaacattttttcaggtgcttctcagccctttgatattccttggttgagaattttttgtttagcactgtaccccacttttaatggggttatttgattttctggaattcagcttcttgagttctttgtatatattcgatattagtcccctatctgatttaggattggtaaagatcctttcccaatctgttggtggcctttttgtcttattgacagtgtcttttgccttacagaagctttgcaattttatgaggtcccatttgtcgattcttgatcttacagcacaagccattgatgttctgttcaggaattttccccccatgcccatatcttcaaggttttcccccactttctcctctataagttttagtgtctctggttttatgtggagttccttcatccacttagacttgagcattgtacaaggagataggactggaccaattcacattcttctacatgataaccgccagttgagccagcaccatttgttgaaaatggagcatccatctttgatgctcatcatcttcttagaattgaaggtgaattcgtagaattggggtgctgtcaggagcagacatgtctctttgtcaaaaaggcctttaattaataaaaggtctttaaatgccatattctgaagatctctgaggtttttggagaccatctatcaatctacactctatctgaattgcttgtnnnnnnnnnnnnnnnnnnnntaagccaatgtgctttttctgtcttcaggagaccttaagtctcagtcccagccattctaagtagctattggccttccttccttcatatcccagtcctgggactaaatgtctaccaggggctggagaggcctgtaggcttcttccccagtgcttttcctaccttttcgggaaaattcctgcttctgctgtttggatcactataactttcaaagccacagaagactgctcagctgactgtcatagctcctttttaatttttcctgagacagtcttactatatgtcacattgggtagcttggagcttgctatatagaccaagccgaattccagctcacagaaatctacctgcctcagcctccaagttgctgagaataaaggcatgtatcatcatgctgagtcttttttcatttaaagaaatgtcctgtgggaaagaaggacacaaactctctagagcataaagaatacagaagtgggtgtatgggtgaagaggaatagaagaaacacagtgaaaaattgctctaatttttcttgattagtttagaacagtaaaaacaaaatacaaattaatatatcaatgaatcatcctttcaaaaagccacaatatatagatcattcctctcaagagtttttcttggtaggttcaatgttgttgaaccctattgttttcaattaataatacaaccttaataatttgtcatgtcagtaaatagccctttagataacatttaatggtattatactattctttcattggaaagaataacattttatgcaaatcttcttaattgttggaaacatgaattgtctaaatcctctgtaaatagtgccacagtcaatagatttttacctcagccccttgatgatgctttcaagtaaaccttctgattgttgtatttgattcttcaatgaagacctggctttgtttatctaccatctctaaagaataaacagtttcctggttaaagagcaaagagtttgggctgggagatattcagtctgggaagtgcatacaaagtgtgaagacctgagtttgatctctaggatccacataggaagtcaggtgtagctgggtatagtggttcaagcccttaatctcagcacccaggaggcagaggcatgtaaacggttgatgagttggagttctatatgtcaaactgtaggcctgactcaatctaacaaaagtgggatacaataggtattgttatgtgcttataaccccagttctggggagaaaatgtatcccttttctggaagattgaaatattccacccagtagggaagctctgtagccagaagataactcaaaatgacttcaggaagttcccaaaacgaatcaagttctttaggttctttcctcctgagagtaagggaaagaagaatttcagacaagccatgctgtaaaggagagcctaagcccataccagcttcctggaagaagcagagaggaactgagtcacctggaaagaacactctgcaacctgtggagctacttgcaggctgtgcagtgtgctccaggttcgcagcttttgtgagctgccattcatgctctccaagatcttcccacctgactctttcccagaatcactatctcgctctgacagatgtcccaccttataatcctgcctcggctcactggccatcagatttttattgccaggtgatgcctcacatagtatataagaggttctctctacatttcccccttttagtccaaagaatggctcttttttggcatcaataaactatatacaataagaacaattctgaaaactatcagataaatattacatctgccatgtccagtccatatgcacatgacaaccttggagaaagttctctgctatctatcctatcttggcaataatcaaatcattttctatcaaaactttcatttataaacataagcatatcttctctgaccttaagacattttctaaaatcccaaacaatttaagcttaattataagactgtaactatctagtcttcaaaccctataagagaccttagaaggaataaatattacctgggtgggcaggaagttcagagaaagtagcttctaaagctatagaaatgacagaggtgcagattacctggacagccaccccaaatttcttgctttgatggagcatccatctttttttaaaaaaaaatagatattttcttaatttacactttaaatgctatcccgaaagtcccctataccctccccctgccctgctccccaatccacccactcctccttcctggccctggcattcccctgtactggggcatagaatctttgcaagaccaagggcctctcctcccaatgatggccaactaggccaccttctgctatatatgcagctagagacatgagctctgggggtactggttagttcacattgttgttcctcctacagggttgcagaccccttcagctccttgggtactttctctagctcctccactgggggccctgtgttccatccaatagatgactgtgagcatccacttctatattttccaggcactggcatagcctcactggagacagctatatcaggtcctgtcagcaaaatcttgctggcatatgcaatagtgtctgggtttgttggatggatccctgggtggggcagtctctggatggtccttccttccgtctcagcaccaaactttgttttcttaactccctccatcggtattttgttccattctaaggaggaacgaagtatccactctttggtcatcttcttcttgagtttcatactgttttgcaaattgtatcttgggtattnnnnnnnnnnnnnnnnnnnnctgctcagctgactgtcatagctcctttttaatttttcctgagacagtcttactatatgtcacattgggtagcttggagcttgctatatagaccaggccgaattccagctcacagaaatctacctgccttagcctccaagttgctgagaataaaggcatgtatcatcatgctgaatcttttttcatttaaagaaatgtcctgtgggaaagaaggacacaaactctctagagcataaagaatacagaagtgggtgtatgggtgaagaggaatagaagaaacacagtgaaaaattgctctaatttttcttgattagtttagaacactaaaaacaaaatacaaattaatatatcaatgaatcatcctttcaaaaagccacaatatatagatcattcctctcaagagtttttcttggtaggttcaattttgttgaaccctattgttttcaattaataatacaaccttaataatttgtcatgtcagtaaatagccctttagataacatttaatggtattatactattctttcattggaaagaataacattttatgcaaatcttcttaattgttggaaacatgaattgtctaaatcctctgtaaatagtgccacagtcaatagatttttacctcagccccttgatgatgctttcaagtaaaccttctgattgttgtatttgattcttcaatgaagacctggctttgtttatctaccatctctaaagaataaacagtctcctggttaaagagcaaagaatttgggctgggagatattcagtctgggaagtgcatacaaagtgtgaagacctgagtttgatctctaggatcaacatagaaagtcaggtgtagctgggtatagtggttcaagcccttaatctcagcacccaggaggcagaggcatgttaacggttgatgagttggagttctatatgtcaaactctaggccagactcaatctaacaaaagtgggatacaataggtattgttatgtgcttataaccccagttctggggagaaagtgtatcccttttctggaagattgaaatattccacccagtagggaagctctgtagccagaagataactcaaaatgacttcaggaagttcccaaaacgaatcaagttctctaggttctttcctcctgagagtaaggaaagaagaatttcagacaagccatgctgtaaaggagagcctaaacccataccagcttcctggaagaagcagagaggaactgagtcacttggaaagaacactctccaacctgtgtagcgacttgcaggctgtgcagtgtgctccgggttcgcagcttttgtgagctgccattcatgctctccaagatcttcccacacccgactctttcccagaatccctatctctctctgacagatgtcccaccttataatcctgcctcggctcactggccatcagatttttattgccaggtgatgcctcacatagtatataagaggttctgtctacattttccccttttagtccaaagaatggctctttgtttggcatcaataaactatatacaataagaacaattctgagaggcggcctaagccacagcagcagcggtcgccatcttggtccgggacccgccgaacttaggaaattagtctgaacaggtgagagggtgcgccagagaacctgacagcttctggaacaggcagaagcacagaggcgctgaggcagcaccctgtgtgggccggggacagccggccaccttccggaccggaggacaggtgcccacccggcaggggaggcggcctaagccacagcagcagtggtcgccatcttggtcccgggactccaaggaacttaggaatttagtctgcttaggtgagagtctgtaccacctgggaactgccaaagcaacacagtgtctgagaaaggtcctgttttgggccttcttcttcggccaggaggaggtccaaatacaagatatctgcgcaccttccctgtaagagagcttgccagcagagagtgctctgagcactgaaactcagaggagagaatctgtctcccaggtctgctgnnnnnnnnnnnnnnnnnnnnctatatatgcagctagagacatgagctctgggggtactggttagttcacattgttgttcctcctccagggttgcagaccccttcagctccttgggtactttctctagctcctccactgggggccctgtgttccatccaatagatgactgtgagcatccacctctatattttccaggcactggcatagcctcactggagacagctatatcaggtcctgtcagcaaaatcttgctggcatatgcaatagtgtctgggtttgttggatggatccctgggtggggcagtctctggatggtccttccttccgtctcagcaccaaactttgtttttgtaactccctccatcggtattttgttccattctaaggaggaacgaagtatccactctttggtcatcttcttcttgagtttcatctgttttgcaaattgtatcttgggtattctaagtttctgagataatatccacttatcagtgagtacatatcatgtgagttcttttgtgattgggttacctcactaaggatgataccctccagatccattcatttgcctaggaatttcataaagtcattctttttaatagctgagtagtactccattgtgtaaatgtaccacattttctgtatccattcttctgatgagggacacctgggttctttctagcctctggctattataaataagcttctatgaacatagtggagcatgtgtccttattacaagttggaacatcttctgggtatatgcccaagagatgtattgctggatcttccagtagtactatgtccaattttctgaggaaccgccataccgatttccagagtggttgtaaagcttgaaatcccaccagcaatggaggagtgttcctctttctccacatgctcgccagcatctgctgtcacctgaatttttgatcttagccattctgactggtgtgaggtggaatctcagggttgttttgatttgcatttccctgatgattaaggatgttgaacattttttcaggtgcttctcagccctttgatattccttggttgagaattttttgtttagcactgtaccccacttttaatggggttatttgattttctggagttcagcttcttgagttctttgtatatattcgatattagtcccctatctgatttaggattggtaaagatcctttcccaatcagttggtggcctttttgtcttattgacagtgtcctttgccttacagaagctttgcaattttatgaggtcccatttgtcgattcttgatcttacagcacaagccattgatgttctattcaggaattccccccccccccgtgcccatatcttcaaggtttttccccactttctcctctataagttttagtgtctctggttttatgtggagttccttcatccacttagacttgagcattgtacaaggagataggaatggaccaattcacattcttctacatgataaccaccagttgagccagcaccatttgttgaaaatagagcatccatctttgatgctcatcatcttcttagaattgaaggtgaattcgtagaattggggtgctgtcaggagcagacatgtctccttgtcaaaaaggcctttaattaataaaaggtctttaaatgccatattctgaagatctctgaggtttttggagaccatctatcaatctacactctatctgaattgcttgtctctagttatctactatctgcttaaccttgaaaacctccaaggaagctaaatgaagcttgtttttgtaattaactaaatgagtatctaacatgaccataagttgactataacttgcatttcttatttatcctaagcagtttttaaagaagctttcaaaaggactagaacttaacattgcctttaaaaaaataggtacaataccttagacaagagttgagattccacttcactccagtcagaatggctaagatcaaaaactcaggtgacagcagatgctggcgaggatgtggagaaaggggaacactactccattgttggtgggattgcaagcttgtacaaccactctggaaattagtctggcggttcctcagaaaactggacatagtactaccggaggatcccgcaatacctctcctgggcatatatccagaagatgtcccaaccggtaagaagaacacatgctccactatgtccatagcagccttgtttataatagccagaagctggaaagaacccagatgcccctcaacagaggaatggatacagaaaatgtggtacatttacacaatggaatactactcagctattaaaaaaatgaatttatgaaattcctaggcaaatggatggacctggagggtatcatcctgagtgaagtaacccaatcacaaaggaactcgcacaatatgtactcactgataagtggataatagtccagaaacttaggatacccaagatataagatacaacttgccaaacgcatgaaattcaagaagaacgaagaccaaagtgtggacactttaccctttcttagaaatgggaacaaaacacccatagaaggagttacagagacaaaatttggagctgtgacgaaaggataggccatctagtgattgccatatgcagggatccatcccataatcagcttccaaatgctgacaccatggcatacaactagtaagatttcgctgaaaggacccagatatagctctctcttgtgagactatgccggggcctagcaaacacagaagtggatgatcacagtcagctattggatgggtcacacggcccctaatggaggagctagagaaattacccaaggagctaatgggaactgcaaccctataggtggaacaacagtatgaactaaccagtacccgggagctcttgtctttagctgcatatgtatcaaaagatggcctagttggccatcactggaaagagaggcccattggacttgcaaattttatatgccccagtacaggggaatgccagggccaaaaagggggagtgggtgggtaggggattggggggggtgggtatgggggaccttttgggtagcattgaaaatgtaaacgaggaaaatacctaataaaaaaaaagagttgaaacatgtatacattgtatgttttaacaaaagataacattaaatttgtatcgatatgcagagtgtataccagatgatttgggttgttaatgttctttggtttaaaagtagatttaataatctacccctttacctatcattcctatacccccacttttttctttcatcccttctctcttccccctaacattagataggagagaaagaaggattgtaaaaagagagagagaaaaaattcccaaacctaacctcccttgctttctttcctccttgactaaaaccattaaaaactcacccaccgaataccacaaaactacccactctaattttgcgaatggggcattggtctcttaaaattgttttctgttagtttgggggcccagataaaattaggatatggccaatttttagaaagctagctgtaacatttgctgtccagtcttggtatgcaggaattgactgaagtcctgactggaacagtctgagagtctagccaacctgggcatcaaggggtcagcagctttgaacatgtcctagaagcaagttttgctgaaacagccaatgaagtagtctgaggttgagtggaaaaggatattggaataaatatttctcagcatctcagcatccttctaatatccttaatggtgaatcttgttagggcctctttagcttcattgatgtctgtaaacatataaacatacacagataatatacatttctgtgtatataatataattaacacatatagggagtgaacagtgtgtacaatctagctgagaataattcttgctctctctttgagcaggtaaggcatctgtctttcttttataagttagtttggactgtataaacaaactgtaattcaaaatttctatctgtggcatttgaatggatggcatggtaagtcttgaagattctgtagccaacaaaatttaatgtttatgctaactgatgtcttggttggagacctttttcatgtctcagccagtctcagagttcttcccatgtagagggatcagcaacgcaaattacctgtttggatggtcttcttgatttctttcatatctacaatcaggatcttcagggatctcccctggtcaaatatgagttttactaatttggatggaatctggagtttcttttcttctgttgaaatgagcattttctcttctccagtgggacatgttcttgcctttcattccgaggtatcatttataaaggctaatctaaataatcagtcctttctaaaatccgatgtattttagcagttatgttatctgtctcattggcatttaaacattttaaggtcaataaagccttatttaaactaatgggtgattccatatcccccttctgttctatgagcatttcctttaaagccctgttagatctctacataattcctcgaactgtaggattgtaagatatgcctgtaacatttcctatgccataatgtctttaaaatgttatattctaatggatacacatgccaaagcaccatcagtttgaatttgtaaaggcatttacaagatagcatcacctctaataaatgtacaatctcaaaaaaaaatcagccttttaagaacttaaagcagttgcccattgaattcttgagtgggtatcaactgtataatatgttaacatatgtaaataccctaattctccaaactctataaaatgaaacatataagctattttatgacattcttctaaggtaagaattaagcagaatctagattattaactcagaatagtgcatctctaaaggttgtacttttaggactctaattcctcagggctatgtggatttttctcatccagaactaacttttctattgatataaattccagactgaattttgttgaagattctccattctgatttaaagaaacctctaagctctgttatatagtttacaatctagcatttaaatttttagtcttctctttctctgtgttttatgctgattttccttaaagaggatatataaaattgtaatcattactgaacatataattaattttatgttgaaaatcaaaacaaagctatatggggtccaaatgccttcttctatactgttttccattttttaggatgggaaaatattaatttctctaatcctttccattctatggagactttactttatttttttcatttctttgaaaactaattttccatctctgtttttttctatggagactttattttctctccttcctccagagactttaatttttattttttatatttaaattcagtgtttcagtgtttctgtgaatgtgtatatacagtttctttttcagtgtttatgcatatatatacatatatttataaatatatacacatttttcttttttattctctctcctttctttagaacttatgctctatgtggatttatttatttctctctattgttctctaagcttaatatctttttctgtattttaattttcataaaattctttcctctggggaattctttctaattttatttaattctatctttaaggattttattatttgaaaactaagtatttgtttctccttttgttttcagacttataaattaccagttcagaagttagggctttgcagtcttccacagctttgagaaaatgtcccttctgcccttctgttcaattgcaggctctacagtccagcccaggcctatggtgtctagcttcactcccttgcatggctttagcaggcttcacttgaattttgggggttagaactgttgtttgcccttcagttagagttgagcctcatacctgcaggcaccagctgggagccgagcctatctgtcccaagtctgggaagttttgtgttttacctgcagggtgttgcctgaggctccagtttgctttcttttaaaaggaaccactttctgcccagctagaaaactgctctgggaagagtttgttcctcacctttcacccgggacattttctcaggctctaagcttggatttttaagagcatgtgatttgggtggcatttgtagccatgagctattctacccagtttcttcgttcccagaataaggactctgagattgaataattgagcaaatggctaggccctaagcgttgactcatcccgtgagtaacgcacaatgtatatgacccgtctattccagcctatgccggccatgtgcttgtttacctctcctcaggtttatatgtccattttctctgcgtccagcatgaaatcttcccatgcctgactctttcccagagtttctatctctctctgccatatcctaatctaatcctgcctcccctctgctgtagagagaatcccttgtgtactgtatgaaagcaacacctgtcaataaaaagctgatggcctattatctgagggagaaaataggaggtgggagttccagtagggagagaggaactctgaaatagagtcgggcatggggagacattcgtcccaaatggaactgaggagaggtatccagccatgaggcactcatagaataggataaatagttaattaagttctgagctcgttaggtgtcaagcccaagtttatctcctgggcataaatctcggagtccttatttcaggacctgggttgcagtgacactcagctgattggccatcagctttgtatcgatgatgatgatgcttccacacagtacatacgagattctctctatggctatctttgagttatttctgcttttataagtaacttctcatccatagtcctgtaaagtaataccaatagaactcatggttcaccaaaaccaaccaaccaaacaaacaaaaaacaaccaaccaaccaaaaccaaaccaaacctttggcttcgaaactgaaagtgacatgggatttcatgttaactaggaataaagaaacatatcaaccataacaacaacaataaaaggcaagcgtcatggtgatccaattaaaggaaataaatgggcatgttcaagaggacaatagaaggcgagcctatctttgttgttgttgttgttgttgttgttgttgttgttgctatgacaaaatatgcaatgttgacaagttaaagaaggaaagatgggtttggctcctggctttaggggtttcagatcatgtttcctggctctgttgcttctgggccaggaaggacttcctcagtgtggaaggaagggcatggcagagcttctacccgacagtagccaggagcagagagagcaagaagaaaggtattaggagaagttgtacccttcaaagtcatgccttctgtgacatgcttccattaactaggtcctacttcctaactgaggtacaaatccactgatagctaactttgtgatgaaccctcagaatcaaatatctgtcagcacaagagtctttgggggatgtttcagactgaaaccataacaaagacgacacgaaatagcttttatgattaaatgcaaatgatcctgcttttaaaaaggtcctattatgttgtgtgtgactcttcattgtgttgtatgagtctgagtgaagtccctaaggaagactatctgtggaaagcaggtcccctctttgcccttacagaagaaaaatgagccacattctttttcctcacaaagagatttctgctgctaaatattttccatagttgtaactcatctgtattttttcatagagtcctgataggtgagaagttttggagacaaaaaaaattgattgtcagtcattttgcttggacaagaggtttctgggtcaggcacgtctatgaaatttcctattgttaaatttgaatgtctcaaaggacagttcagcttaatgaagtgggtcagcatcacatgagatgccatcttgccttctccaaacatttccatcaggaagaagcactctatcatccattgaggttttgtttctaggctcacagcacagagatggggtttgccctctctagatttcacagtgaaatttggtccctgaggtgacagggtgccaaggtgggccctgggaggtgattagctcattgagagggcataatacctttgtcataggaatggtttccagctctcctggaaataggcaagttgcttcagggtgggtcttcataaaataagcccctctccctgcattttgcccctttcacaaagcacatgtccattttacccttgtttcgtgatgtgagaagcaagcagcaagagatcctggtaagagaggtgctttcagcatgcacttggacttctgtttatcctcagaagtaggagagaaaactctactcacccagtgtcagttattctgttacagtgacagagaatgacagagacactaggaggctatatactccagatttgagaagtagactcagcgagaccccacccagcctgggaaatgtggtgacaacctgggcatgagattattagatgtctactaattgaccaatgaccacaatgtcaggttacttggcggcaaggtcttggggagcttctctgaacactgttgcttcaagatcttgtcttctctacccttcatgtttccttccacacagctgggactatgttgaggtttttgaggcattcatttctcaagttgttaatagtgctccttcctcatgccttctttgccttttcttacactttaaaattaacttgtcagtttctaggaaaaagtcagctaggcttttaattttaatcatgttgaaactagagtttttttcagggataattgactcttagcaatactgacctgtgagaaaggaatatctttccatttatcagagtcctcaattatttgtagcagcgttttatagtgttaagtgcatgtcatactgttaaatttgtctccaagtatttatatttttcagacccttgtaaatgctactgcttttcaatttaaacttgcgttgtgtgttgttagcttgtaggaatacaatctcgctcaaccccactaaactcagttattagttacagagtttttttttttattatcttatgtgtagagcagcataccttctgtggcaaagagaactacattttcccccattgaatctatgtccttccccccacccccttttagactggcttgaacttctagtttaatgtcaacaaactttccttgcttctgagaagtttgttggatcttggatcttatcttttcttggcagctaagcatgagaccagggtttagcatttgagataaataacaagggcagacatctgtgtctcccactcccaaaagcaaacattctacgtatccctactagttatcacataagttgaacatagatgcttttttaaaaaaaatcaaattgaagttctttttcattcttactttctgagggttcctttaaaatcaactggatactggatattggatttgattgagttatttgtagagctctgttgagatggtcacacaattcttccctttttatcctaccattaaagagaaataagttgattcatttgattagtgaattaataaagtacttgatcatgttctttttcaattgttgtattcaaagttagcgaatgtatttcaacacgttagctaattaatttcgagtaatttttatcctgtactttcaaattcattgattttcttctatttcttcatctgatgaatttttccatctcagacaatgcatatttaatttgtagaaattcaatttgtcttttatttttcttcctatcacaaacaaattgtactttatttcttgaacatatagtgtggatttctaatgttcattttgtgtgttaagttcctgttctattgtattgtttctcaatctatagctattgattacttctctagttatggactgtattccgatgcttcattatatagattgcaatttttgattagatggggaatattttaattttaataaaatattttaatctttgagaatgtcatatatacctagaaagtatttcagccatatttacccccgttccatacctccaaccctcccagttttccatcatgtctcatcctaacattatattttctttctttctttttttttctttttaaaaacccattgagcacaattagtgcgtatcctgagcttttgtccccgccggcaagaacacactcaggacaaccggaatcttctgtggcaaagtttttattgcttacttatcaggagggaagaccctgaatcgggaaaatggcgctgcttatatagcccacagtgtgacgtttcagcacctgatgtggcgtgacagctcctgattcgttgctcgcccatcaccccattactacgcagcaagatgggcagtgactaggcgtgagttcactcttgcacttgcgcgtaaggcttgtttactagttaggcacagtggaagccagcaccatcttataatggcgattgctcatggcacgcacacgattgctcgcggcacggctctccacaagtgcgtgggtgtggggtcatccatgtgttcatggtcaagctgctagggagcatactcttaaagaagactggagctccctcccctagtttccatccagtgtcaatagctccaaaaccaggggtggggcttgtacctctcattgtctatactggaatgttaaatggttttatattgcgctgatctcatgcagccaaccacagctgcagagagttcatgtgtcccgtagtacactcatgtccagatactgttttacctcagtcttcccagtggtctctgactgtgacaatatttctacaacctcttctatgaagactttgcaatttttttgtaattggacattgggctcatttttgtttgttcaaacacccatgcctaacccttggacatggtcctttcggtgctttgttcccttttgggtgttttaatacttttagactctctttggacctttttttgataggcttatctctccagtttgtctagttagacttatagcttagaattgtgacacctgcttcttttaaatggccctttcctagtctgagacgatttcaagtacatgcactgatcaatactccatgaaagattcaaacagaactccttacagatttctgaacagggcccttctgtgtatagctgtgtagtgtcctgccttgtcactcctaactgccccaggtcccaaaacctcagaccatgcttcagttcatagagactattatagtctatcctgactgtcccacttcctgggctacagcattggaagctcctctgaggagctcaggcctacttcattgactcttctcttgagtatcactgtctggctgtgtctgttgcttggtgtctggcaactgttgtgtcatttatgttgcttttagttgactaaggtgcagatagattccatttacatgagcgcagatctcatacttgtagtcaccatcctacattatctaccttgcttttgtttttgtcatgaatcactgacccaagacaacttggaaggaagggcattgtttggtttccacatcacagtttatcaatgaaggaggtcaaggcagagactcaagatccaaaggcaaaaatggaagcagaggcaatacaggggtgctggctactggctcgctttctgtgacttgcttttttttacacaatttaagatcatcggtccagtaatggcactgcccatggttagctgagccttcccatatcaattattaagcaagaaaatgccccatagacattcccacaggaggcagttcctcacctgaggttctctctcacctcatcccaggtaactcaagtttgtaacaagttaacaaaagcttacacatatctttatacttttgcgctatatatttggatctgtttaggtgtaaggattctttctctctttctttctttctttctttctttctttctttctttctttctttctttctttctttcttccttccttccttcnnnnnnnnnnnnnnnnnnnnctctctctctctctctctctctctctctttctttctttctttctttctttctttctttctttctttctttccttttttcttttgagacagggtttctctgtatagccctggctgtcctggaactcactctgtagaccaggctggcctggaattcagaaatatgcctgcctctgcctcccgagtgctgggattaaagatgtgagccaccggattttactacattgagctcaaacctctgaacttcagagccatactatgctaagactctgggctatggtatattttttaatcatttttggaaaaattagtgtgatatttcaggattttaaattataagtgtgattcaaatgtataattttctatcagctcctcagggattaaaaaaaaaaacccatgaagtgttaatgtgaaacagaaggtctcattttcctagtggttaggagagttatgcacaaatacaaggagatttaaatgttcccctgagacaaacaaataggtattgcaaataaaataattaaaatggtttgtaacaagcaagcaaatgagtacagagagggatcagctgctatgatatttatttttctgtttgaatatctgcctggggagtatgctgcaaattaaaggacccaaccagcttttaaaaatccaaaaagctaatgacaaaatgaaaagcgttgtcttggtgacatagagatagttcctggggtcatgattttaaatattaaaaaaaaattgaggtcactttgtccaggtgtgttcatagggatgaaggatcccccctgattttctcagtttctttccatcatttcttgcctctctctcccgaatcgtctttgcttacttcatgggtacctctctggcctggtactcagtgctaggaagccagcagggtataagtataagtataaatatgagtatgagtattagattcacactttgtccttgagaaattggtctgatgaacgtgtacctgtagtctccttctggttttgtgtgtgcatggcaggagcctttgaattcacagtactcctggaggtgaatcacagctctgcactatatcatgcagggtctaaaagtccttgtgtatttcagatttgaactaattgaactttgcttgtgcaactcttgggatttcttttctgggctcatttctgtattgctctgctgggagtagagagtgtcaggaaaggtctcctctctgcctataactgtggaatcctattacttgaagggcttcctattcagactctgtcctgaggtgttggactttggagactctagatttgtcctgccttccaaatgccaggtgaaattatttttagcttgtccctgaagttattttagtgcttttaaaacttgggtctagatctgcagaagtttacatttcagatgcaacttagagcatacctcagcaataatatcacatccacaaaagtgaagacacagttagcaattgctacagtcctgtttggagttgctgtgaacattttaagatattctgaatccatttggaatgaagggaaagtacacaaataagaagttaaatggagttgggagaatttagaaaacttaagcttagtggaaatggaatgttcacagaaggtcaagtcagaagaggggaaaggagaaaatatcagagagaatggagacagtgagacaataggaaagaagagagtaaaataggagacaggaaataagagagctgaccaggatactcacaagcttctctcaaatccacccttctggtcagaggatggctacctaattacccagtgaatgctgaggatgttggagggtaaatgttcaccttgagttcacaatcacatataagggacatgcaagatagtaaatttaagaaagtagaatataagagctactcaatattcagagatcacagagaccctctttggacttttcttaccagtcttttagtacaccaacagatcttggagagggttcagagacataaacagggaacctagggtccactgtcctggttcttggccacatccagatgttgctctgtagggaatgatctgagccaagtaatgcaagatgactgtctggtccagcctatgcgtatgtgctgtgatggaggaggtagggttggcatgggggcataagtctgtcagctatttccttggcagttcagtgtaggaggacaggcagagtattggctctgtagtagccatctatttccctcttacaaataaaggtggctgtactctatttccaacaatgacctactttatttaggagaatggttgcctatggtgttatgtcttggcagggaatcaaggaaatgtatcagcagtgaggaacaggacagagccaaatgcagattggggtggtctgttctgggccccttcaggtgtttggtagaggctgcaggagcaatgaggtggtaagaggaaaaaataagcctttgccattgagtctatgctagattttaaagactgtagacagctatagattttgagctagaaatataaagggacttgtttttaaactctgctagccacattctcttccattaaatcaaaccctctgaattatgctaataattcttgggaggacttttatcacatttacagatgacattcaaagaaatgagatattttgcttaagttacacaggtaaagatgggtaaaatctgggattggaggccaaagccatctggtctcggatcctccactcttactacatcactacacataagtaacgagggcacgtcaaacattaatgtacccatgagtcacctggggatctttttatgatgcagattcttattagataggcctaggtctgagattctgcatttccagtaagttccataatatctgatgctattggtcccagggaccgcattttgtgaagtaaggaaatcatctgcaatttttcacaccctatataaaataggaagacctcatcatgtttacctcatcagtttgtagggaacaactcaagagctagggtctgactcaggtcagaataacttctcacaagttgttccagccactattatcatcagctcagaaaatgcactggaactcagctttggtggcactctcttgacttctcctccccaggatgtccttattttcctggagccttggcttgcctacatctgagtgctctgtaggtgtagcacatagtcctaaagccttattacttcagggaggcaaattctgttatcactacttgcatttatcaaaccctccttacatttcctcaatttctctaggcaaccttgtctatgaactttctctactatcattaacttgggattactgatgccatgactcttaagggggaaataaactttcctactccacagagatgcactagtgctggtatcacacagatggttgatagatctaggtcttttggaggaataaaaggaaatgaataataatgtgattgcatagtccaatatgagtttagcaatttatatacatgtttaatatttcccctggtattagaaggttccaaaattttcctgaggttttaaagatctgacaaaaatatatgtgagtcttgcatctaaattgccaaagtgcatatttagaaaaaatatattctcctcattttaattaccattttaaaagtgtctccttattttctcctctttgctattaatcttggcttgagtaagacctctgtagtgattctctctggtttcatgaaaattattcttagaggcacgaaatggtatatgaaaagaaaaaaaaaagtccacattcttgcttttcaaactgcattgttagaagtctcagatctttagaaactgaccatgtcatctgtcatgggagactacctcacacagtgttacgatcctactggattccatagacttctgcttgtttctaactttactcaaagcctgccttcttgagcagcctgagaatttgtctgcttacctattaatgccttgaagtatttcaggaggttttagggcaggttgagtaagaggctgagattagtatccacacaccagatatagaggtgcataccagtcttacccactttcacaaagcaggagcaggaaggttctgagttcaaggtaacttgagctgtagttaccagtttgtgatatgttgcaagacccagtcttaatagcagggactgggtttgtagttcaatgttaaaacactgtcctagcctgcttgaagactggattctcatacccagcacttcaatatgggcatgtgtctttataaatatatagtgtgaatccatagagccttgctttctgtattttgatgaatttgcatttaggtcgaatctattcatggcacagaaaagtatcagaaaggtgctgtctgagctagattgtcttaggatttacaaaccttcttagaatctatgaaggaaaaattctcatttccacaatctgaatggctgcacaatgcatccctgacactgaccaatgtaagaagacaacacaaagtggatcagaccatgcaaaatgtatctctggttcgaggtatagcttcactgtccactgccatggtcctggatgaggaagaaagatgcagtggaattaagcaagtgtggaggggagggggaatctttcagatacatggaagatttgcttttttcttcttttttccagtgtcaaccactttaccaaaacatgatgctgttatgtgtctgtgtgcatatgtgcatgtgtacatgcatgagagtatgtgtttctgtgatgtgtcttcatttaactttattttctgttttctaaaatattgtatatctctatagataatgatgcaatacagaagacttattctgtctttttttatagccacatcgtagtccatatgaactccattgcttctttgattctctctctttttcctgaagatcacatcagaggcctgaatggaagtaagaaaaggtgtctgagtctgacagatactatttttgtccccagcttaccctgttggagttattatcatttccattctcctcatagtgagtgctaaggaggactttaaaaaccactctcagcctccatatcaattgttcatcacctggtttttggacaggcccatcgaggcttcttttgaaagtccagtacagccatgggatttctctgcacactgtactcatatgtggcactttcacttgaaatggcacactcctgtgaagccagccatataccccagctgaagactcacatttcccagggaacagaggcaatcagatctcattctcttccacagtgtgctctatgagagggacaattttgctttcaatcagtgaattaagtatgtgcctcctgggaaaatgtgaggattttcttttctttagaattcttctaactttccagtgctcttaaccctttgcaagtgaaggagagatttatagatttccttaataatttatttgacttgaaatgcatattttcccaagcatcagtatgcattcttgcagaatcagagacctgaataatgttattattcagtgcacggtgcagttcctcacactttattatatctgtagacattttcctgtaagttttttgcaaggcacaaaagagtcttattttgccttcagtgaccggtaagaagaatttgatagctatgttaactgggaacctcaaacctcatttcttctgtacttattgtgattatttttctatcacattatagatatatgctcttcccattgaaaatacaaacatatctattggtatttctttctctttctctgtagcttctatcaataagtgttctagaattgaaatttcaactatttctaaagattatctgtttgcagacaccccagtccagtgaataatacagatggaaggaaatttatgggtgggacctattagattgtagaagaagaaggtaatagcaactcctggggatacttctgacaggaaatgtgaagtcaggtaggacctatacagtgatactgagatacatcacaagcacaggcaggatttggtcaggcagagggggctgcatgcgctcctcctgagttttctaaggtagtgttaatatcaatacaaactaggaaaacagatcaaatgaagcaaatataagctgcagtaatagaacaattactcagttttaaccagacacacagctaggacatatggggaacagtttgtaacatgggtgtgtgcctcagaataaaaacataggggcatgaaccaaggcatttaaatcccatgcaaaaggcttaggatatttttttttaatgaaagattagcctgaataatgctctcagaaggaaaaggacctccaaatagctaaatatagaatacttaaaatattttaaaactaaaagttgtcaatgtttgtcgtgaggccaaacataaggcaaaaatataaactcttaaagtttttctttcagtaagttggtcaaattgtagaaacctcaagcttttgttcccatggcaatgtggggaatatgaggtttgagattaagcctgaggacttaatctcatgtggtgtcgaatgaaagatttccacatacaactggaagcatattctctgtatcagagatggtcagaaaggaaagcattgagaaggaggtgggaaacaccatttcctattatgacttcagacttggataagggaataaaaattgacaaccatcatgtaacttctgactcattttaatacccctctattttctcacaaagctcagaggacagttcaatttatagtggctgtagttggcatcactcttctatgtatggcagaatcaagcataaacactctgaagttgtgtggatgctactcacagtcaaagagctctttactagttccactcctgttgctgtgataaaatattctgagggaaaacgacttaggggaaagggatttatttagcttatgattacagattacagtcatcactatggggaagtcacagagactggagcttgagagggcaggtcacatatccataatcaagagtagagagacactcatgcaacaatgatgtcttcttacttggtgctcagccagtgccccttacagggtaggagtggttagactcacagtgagctttaataatcaagagcattccccatagacatgtccacaggccaacatgatcaagataatttgtcagttgtgactttcaaggtgattccaggttgtgagaagttgacttttaaaattaactattggaaactcctaaaggattcctaatcaaaatggtaaatacgtgtggagagaggtagggaggatgaagaagaagaagaaggagaaagagaaggagaaggaggagaaggagaagaggaggaggtaaaggaatctctatgagtgagatctagcaaagattatataacataacataagtatgttgcaaaaatagaaactgaattatgtgagcaaagagtgaaagacttgaatggaaggaaaccaaattaagacaggaataaactagtcaccaaatgtaataattaaaagttgaaaagcttggagatgctaagtgtcaagttgtacaaaagtagataaagaattggttcagtgtaatttatcaagagattatttggtatatatctcacagaaagggcagtggcacaaatgaaataggggttgagacaatatggaagatagaataacaatatttagtatattttcgagaaaataatgagcattagaatattaactactatgtaatattatggctgatgactttttaagactgttgaaagaaatctatcaagacccatgataaagaagtgattaaaataaaagacactgaggtacatcatagagtgagagtatcagggtgttaaagatctagaaaaatctagactattcagagggaaaagagcaaataactttagtctctgtacatggctaactagtatctcctgtggagaatggtctacaatagtgctgctgacttggcagaaataaatatattctaaagatacactttagctatcagactatcaaaataaaggctccccaagaaattgtaatttccctgagaattttgctgggagaagaaaaacttgtggcagcctgagtgaaaactcctgccttgagaaagagcattatagcctacgacaagtaaaggtctacaggatggagggtcacacccataccaggactgtttagatgtgcagattgctagccctttagactggaggtggtcactggtcttcgttgtccctctttctaatgtggctatattgaataaatcctacacgcttttgctattgctttggctgttctgattagtcattgaggatggggcatagacttggatcttaaatgtcatgaaagtagccatacttttggtttcaaatgagtaagttttaaagtatacagccaataatataaaagaatgaataacaagcatcacatagagagaaacagcatatagagagcaaaacgtcattgagtcagatgcttacaacaagaagcagaaacaattagattggtctgattgggagagcaagcaaaggaacagccttatatcaggggcttacaaaatccaaatgaaatgcccatggcaacccgaggaaacccatgtgtgctggaagtcttggctgagagatttctaggcaatgaacagcattctctccatgggtgaactattccctgttgccaccccagaaatctttataccatgggataaacaacaaaaacctctgttgggaacagtttactttccaactgttctcaaaggtacaatgttttatggactcccctaggtgtttgttgtttttatttctttctgtcacagagttagggaaccagtttgtactaggacagagaattttggacacttgagttaaacattctgtagtctggggcaaaatagccttctttgctcccagcgtctactgtcagcaagtttaaacagtatgcagccatttaccaatataatgtttatcacaatttaataatggtcttcagagatattcaaggcctacccctgaaatcagtgaatgcttcttcatataaagactttttacaaatgccatgaaattaatgatcttgaagtgaggatctgagattccccaatcttggctgctccagatgggctctaaataccttaccttacatctttacgggaggcagccaagggaaacgcgactgtacagaagataaatagtgatgattaatcttaatggctagtttgatgaggtttagaatttcttaaggggtcacacttctcagtatatatgtgagggcatttataataaaatttaactgaagaaggacctgtgggctagatttctagattggagaaaaggaaataggcagtgagcatctgcacttgtttgtcggcttccctgaccagtggggtcactgctgtcactatctgactgcatgctcagtagacactttagaaatggttttaagaaggatttttgaagggtttggagctgtagcctagagacctcctctggaattctgtaagcagagtgtcataggttgtcctgctagaagggtagaggctcagaatatggaaagaaatgcagacaatggagacccagctccaggcttgaggggagaaaagaaagactcagaaactatacttgaggctgttcatgttacattatggcaaagagccacaaaatgatacccgataccacagagaatccagatgctggacatgtacctgaagcatatattgttttccttgttggatttggtcggcccttgacttgaactttctttgctacactctctttttgaatgagaacataggctatctgacactgtatatcggaattatgtaacttttaattttatggtttgtgttaggtctcagaagggactttgggctttgggcttttgaacactgttgaaactgttagttggatttatcatcagcaacttccttgaaagggcatttacaatgatgtaccttggatgaagaaaaaagaaagatgtcagatttaaggctagaagtccagaaaagatagtggaactgatacatacatatgtattggttgtgtagacactataggagaacttttgtaaaacagcagagatcatgtacactggaaggccatagaggaagagagaattaaacactggacgttgttgacaccttagccaagcttctgctaactgggaataagcaccaaagaagaaaggaaaatatcgaatatctttaactttaagcatacttattataataggtaagaaaactaataaaggctaatatagaaaatctaattttctaaaacataaataaatgcaaatagtaaaaataaatgatcccaagtttggaaaaactgtaatatacaacaaaaaaaatccaaagtatgtaatataagtaatctgatgaagtaaacccaaatatgtaaataatcataatgaatataaatgattagaatttctactaatatctcagatctagatataaacatttctagtatattttatttacaggcatcccactgaaaacatgaggtagataaaaatcaaaggaaaacaaagaaatgaacaatgtgcataataaccataatgcaaatggcatagctgtagtaacagcaggccgagtaaaccataaggcaagttgcatttttagaaataaagagcgtatttaaatactagtaaattggtcaactcagcagtgagacagtcttctaaacttgtatgtaactaatagtaagtctttaaaaatatgtcaagaaaacacaggcagaattcaagaaaaaaacaaagtcctgaactagtggacctgaaaatagatatttgacagcagcaagcatgtagcaaaaccacatgaagtgttattcacagtggccacaaagcaaaaccacgtgaaacagttatatacaatggccacaaagcaagcctctctctacccaagctcagaagggtttaaagcttaactgtagcaaacattccacaacttggagaagatatttgtagcatgtgacaaaggcttatttagaataaatttaaaaataagagacccataaatcactatgcaacagactcacccagtggaaatttaacagtccacaaatataaggacagaaacataaatgcatgaaagacactcaaccctattaagaattaagtgaaaacaaatcctaacagtattccaagcatactcacgagactggcacatcttaattagtcacatgtgaggtgttggcaagtgtgcaggactaacactcaacttattgcacgatcataatttggtacaacttcattagaaatttggccctttctaataaatttgagcatgtttctattctcttatcaggataccacaatcttaggtatatgatgccttagagaaattcttacacaagtacatgaagatacacaggaaattgttcatagatgccaacaagtgaagcatctattatcagcaatgggttaacaaatggtaacccttttgtcatgtcatgttgtcatgcacacctacacctggccccatgaacaaaccttggaactttaatgtttaacaggtttaatgtttaaggtttaacaggtttaatgtttcattttaaaagatttattttgactttacatgtgttttgccttcatgaatatatgaatatgatgagcatgcagtcctcttagagccagacaagagcgttggaatcactggaactagagttacagatagatataagtctccacatgagttatggctctaaaccactgagccatctctccaccccatgagcaagtggttttatacattggtgactattggggtattattcagagtgttcatggagaacccaaagagtttgctctttggattcatgtaattttatcaagctttcaaatgactctgatgtaaaatagagtataaaaaacctggtgttaaaaccagattacagaaggatccatattgtgcagcttatccacacttaaccaaaatgtacaagagtaagtttcatgccagctaggccacagcaggacaaaggctgtttgtggaaagaaggcaggagttaagtatgggaaaccattcaactaagatgtgggcatcattttccttctcagtttgatggaagatacagtgaattcattttattattcatatttaatgtacaaaatgcttatgcatatttcacagtgatgtttatatatgacaatataaaaaattttgtcttttttgatcctggatactccagtgagcatcatgcaatactattatctcttttgcttattctttttcctctgttagtttactgacattgcactgtggtgcaatcacactgtcctgctgcttgcatttatctgcagcactacttgaatgcatgcttaactgggacaaggggaagttagctgtccaagcagctcatttcactgggctgcttgtatttctctctgtacagcaagtctagagtttggagtctcttgcagcttgtatagaggcatatatcctgctgacagtgaacaggaagtactcccttttgtagtaattactgaattctggagggctagtaggacaggaatagatcctggcatggaactgctagatagactgatcacctatgttcagaattagggcaagggcagaagccaatcattttggttgcatgtaaataactgtggagattgccttgagcagactcccagatcttgagtacagatatttctgaattggccaagaaggagagtctagaagcacagatagtgaggtaggagttcactaacagggaggaccgtgtgatgactcatggcaagcagattagaactgagccagggaagacaggaaaggtatacaaagctttagcagatctccactgtgagggaggcatatggaagctaataggttgtcatagagctgtgtcaagtctttaaagagtcctgagcatatctgagcagactggggcagtgtcaagtccccaccactgcctatatggcagcgtaccttagctactcacaataggtgagtagcaggttgccatggaagtactgggtcaccctgtaggtcaaatccctaacacagttacagaacatgcctagagtatggtagtgtgaactgagtgtttcttgtttgtcctattggctgttgaagaagcagacgaggcttaataaaaagatttctgtaaaaatggctgttgctctccagtgacattttgcattaaaaatacatgggagaagcaaattagatggtattagatgcctttgttttctaccttgtctgtaacatacttaattcgagttttgtattttatgatacctatatttctccttttcttctttttgcattttatttatttatttacttacttaattatttatatctgtttatttcgttagttagagtccagatctcactctagtccaggctgacctgtaattgactatgtagcccaggctggccttgaacttacagcaattcaagttccctcaactccccaaatgctgggattacaagcatgagctactgtgactggctgatagcatacattttctagataagaaatctgccccaaaccctctttagttgtagtttaagcaaagtgaactgtctacttgttagtcttttgatattcctcctgcctttgaggttacactgtgatttctctcatcccccagcctccattcattctctccgaagggcctaggtccccagtgcagctagagcagctgggtgcacatgtctaggctcttcttagccgctgcccactccttgactctttctgcgttcaggaactgtcccttctgactctgcctttgattacctcctggttgcaatccatggaaaatataaatttcagtcacatggatgtaaatccaactcgaaacaatattttaacttttgtgagatccagataattcagtatatgcagggattgacaatcttgctgaggatacaggggtgcgctcgctcacagatctagcatgtgctttctagtgaccagcccccccaccccctgacacacacacacatacacacacacacacacacacacacacacacacacagtcactcacacaaacagtatcatcctaagacagaccctaaatgtttgatttagcatcttacccctaaacacattatgctctcatttaaatgattatgaaattcctatcagtaattttctgcctggctatctccatttgtgctgtctcagggtctcaaaactagactgggtcatctgtaaaaaggaagatttaaagatcattttaaaattcaacaatttcagttaaacattgacttggagccaagcatgaatgaaataattccttagagacagtgaacttgggatgtccttagtctgactgccccactgttggaacaaggggtgaatatttgtttccatttctttgtagttcattgctagactcagccatgcagtcttgcattttcctctctgacctaccccctatttgtttctgaggagcccataatgcaaccagaagttttcagaaaggccattctgattaaggcatatatgtacctaaaaacttcaagctccttactagcccttggaagaacgctcactttctatgttgctgctcttgtttgtttgaactggcatggttggacccaacttccctgtctgcctcccttctattgatgcttctacatggaacagagttcttctactccttgcagactcagagtcccagttatactttgtccccacaggaacacacacacacacacacacacacacacacacacacacacacacacatgcatgcacacactgtcatattctcacatgcaagcatgcatgcacacatgaactcacacaccttcttatcctatgttcattcttgggcttagttcaagtctgatttcttatagaggctccctatagcatctgcttttaaaatttctgattttgagggtgaaacgacctaataattggatccccttcatagtattcttagggttgtttttggagcatggcattaataattgcaagcaaaacacctggtctgtcaaggtctagcacaacaggtatctttgatccctgacacactcattgtgttctatggtgaaggtttattattgacatccactataccttggtgcttactatagaccagagctcagagggaatgttgaacagtcctgtttgtacctaagggatggtaagtatttttgtaaataagcaattaatgaaatggacagccagggccgaatcccctttaaccatttcggcattagctgtttgggcttttggcctggatgtctcctagtgacttttttttttttaattcatgagggtataagcatggatttgattatttcttcaggaaatcagtgaccccgagatcctggatctggtccacagtgcccttggcaggatgaccgtggtccggcaaatcttcccatctgcaaaggacaaccagaaatgtatgaggaataaccaccgcatctcctccctgctctgtgatccacaggaaggctacctccaaatgctgcaggtcagtacagcacagcgtctcttccatgtgcggctctcaccacacccttggtctagacagacagcgtactgggcctgctgggctctagatgaacactactactcactcactttaatgactaaaatactgtcattcactgaaatggaatccagttgactagatacaagtgtttcatctcatagtacatcagtggtaggtaactatgccttgtatcagcaagcagggactgcttattctcaaggtacctctgatatttaaaagttacatgattggagtgggcagatttctctctcttcggcctttatgctgagtgccttgtggcagggttggagcttttctttgtccttttctttgtaagaagtcacttacacagacactaagcttgtaaaacacttaacacagccctggcacatctgctaagtgctaaggtgcaggccagccaggatgctgcagctctccccagagcagaaagacgagagcaggtttacccatgcgtcttgctctgccccttcttagagaagagctgtaaatgtttaggttagtactccagtcactgtcttagtgtacgtatggtcttcatcatctgagaatgtggccttggcatagtcatggggcattttgcctgtggtacagatcattttctgtatgaatctttgagaacaacagagaaacaatgcagggggcacatgacatataataaaagaaagtgccccctattggtttgtggaaattatctgtaacgttgcctgtaggatacactcaccactcagcctttgaaatcaggcccaccttctttccccagccagggtgaggagtagataccagagttgagatcagggctggctatatcatggtatcactacataagaagatcttcataatggagaggggactgtgggaatcttgggcgggctgtagatacatgtagtccgtggaagccttgaatccactctctaatctcatgttgtcagaaggagaagaaagcttgtctcacagatgtgccacatgagagaatggctctcagtgctttggaaacacaggtaacattgattatagctggagcacctgccttcccttggcgctcactgtgacacagagtgcatccatgcattggcaagacagaatagccaaggtctttctgaggttgcaagggtttgataaagaaatgggagcattggctttgacagagccatgaactagatgttggatttggtgttagaaaggcctatggtatggttttcctttgtcttattttttggaggggatggaagaagtgacaagggtcaagtgtgtccctcttgctggagcactgtctgcatcattctccctctgcatgtggtgtgcacaaagctggccaaagggccaggcagtatgagtgtccccactctgtgcaggtgagggaatactcttccttgctgggcctaaggccatggctttccattcctggatgatctcccaggttccctctcccttggtgaagtttatccctctctagtctctgccatcctgccccttcaccacctccatccttctgtcaatccctctgtccattttccagttctcattaagttacattgcttcagtttcctgaaattagagttactctcagttgtccatgggcagagtccaggagcagttcagggtggggcagaggagagaggcttgcacttcttctccaagttcatgacggcactttttgctaagggatgactgtcctgacatttgtaagagtcaagctgtctctagcatttcagtcctgcctggtgcagagtctgctttctggaagagaacaagggagtctagagggctgaggggaagttcaactgatggcattctgatgtggcaggtacccaaccatgtaacaaaggttctgggccacaaacttcagggtccccttccttctctgttctttctgagacacaggtaccatggaaggaggagaactaaagcacaaaagcactagaacttgttcatgacagttacatcatcaccaccaccactgccaccaccaccaccacctcataaatgaaactacctgggtgcatatcccaaccattctagctaccacttcattacttaatatttactttttattttgtgcctcattttcttgcattgtccaaccaagacatgaaaatctgctactatgatgaatctccacaaaaagtaaatgagagaaaatgtggaaagtatttagtacaggctagactgctaagaataccatcagatgaggtggccagtacaattcattttccataggatggctgaactttcctgtatacctgtgtcttggcaggtgtcaacattaccccgtataggagaacagttcctatccctccaggcctgtgtcacatgatttgtgactctcatgtccccatcacttactcagccactcactcactcacaacaaccttgtctgaggagaacagcccgtgcttttatctatttagctcttcatgaaagaccctgctcactgaagaccatcaataagaatatatgagatgagtctgctaataatctaggacttaaatcccaagttaaatggtctctagaagcctctttatagagagataagtaaagcactttattaaagaaatctctttcctttgtccatttgttgtgtctacatccttctttggggctatgatgggaggggagtatggatttatttactcctctgcccaacacttgggcagcttgtagattcatctcatttacaagccattcccttcagttttctcagaaactattaccacttctttctttcctaatgacagtatagaaggcaaactaatttctactagcctctagctgtgagatttatcgaaaagactcgaacatacttagaacaaccaactcaagaaaaaattgctgtcatggattattaacttcgtcttgatgaaattaatgaaaatccccctggaaatagagcccccaagtccctctttgctccttcctcagacagctgcccttgggatgttggtcctagcttatggattatcaaagcacaaggaatttttgcaaggtcattcatcatttggcttctctatcaaagagcactggtctctgagaaactctgtcttcctctattagcccgatggtcaaggatttctgttttgaaaagccaagaaagtactatttgcaaatcaatttggttgctatttagtacttattttcttccaagtcccttggaagaaaaatacctagataagtggcttccagtggtgtcattgcatttgcctgtgtgtggttgtttattcttttctacaaagcactgcctgatttgggtgtttctcgtttttgttttcttgacaagttagtttagggcttgtctgactcagctggtaataaaagtgataaccagtcccctagaaccctgagaattctctgagatttcccaggatgccttcctcagagcagagtcaccattgtatccatcactggaactgcctctctcagggacttcaacttgtaattgaactaacagaaacgttatcacatcgccaccccatctattcaaatgtgtttcaagagcgtggcagaaaatggcatggactgtggtgtctggtcactgtgctggcttatccaagctgtaggacccaatatagtattgtcatgaaatgttcccaagattggaactttggcatctttatgcacttaagagttgctgaatggctcaacaaaatcacctctctctggcattcagtttgctgaagaaaaccactgaccttctagtctccatttcctagaaaccttcagttcttttccctggtaatggtttgtcaatctggtaagagaagcttttcctctggagcatccttcaggcttccctaacctatctcagatttcatgtcccatccagagctatatgtaatggtaaagactccaattgccaagtcagcaaggatggtgtggaatgctgcacgagtcaggtgcatgggtggtctccttgggtacagatgcctgctacttgagttgcaggtgttcacatgtgtctttgtagctgagaaaggcttatatggagacagatgctctttcatattctcccttcggattcagtggtgaacagggcctccttacaaccctttatcctcagctgccagctgctccatcctctggcctggccacagtgccctctcaagacaggtggactagtagcagtttggcacagaggccttgcctggggatgaattgttcatgctgaggcatctggatgtcagcttgtcctcccagctggaccctctgttgactgcttatctgacattgctggccaaccagagcctgtctgcagatttggtcagaggtcagtgtctgctgtttatctccatgatgtctccccaaacagcccactttgtttgattaatgatagagggaagagcatgctgggctctttagacgcctggaggaaatgtggcccttcttaatgaaagtcttcttgcatttccagctctggattgtgaggataatggactggtgagagatttctgctggcctgtgtggctttgaccttggcctgccattcatcttccttttgcttcaagcatgattttaaccctggtaatgcagtgtgcaaccctcccccggcccccagagcatgactgagacacagctggtgtaccctaataagtcttgactggaatctcagacttactaaggagaagtgaagcatcaggaggcagacagtctggctgcgcagtggggtgcacacattatcctgacctgctcaagcccttcctttcctggccagtggaggtggcagaggactcagcctgctggcatccagacaggcttagactcaaggccctcttgagtttatcagcatattttagggaagcgcttatgtctcaggccctaatcctttctgtagtaagtgaacaggctgcctacaccctgccttgttagtgcctaggtagaaaatatgttttttcctggttctatttgtgcaacaaacctttacctgcacaagctccttgtggtttgaatgatgtattcctggaacatttctatgttcagatcttgttcccaaggtggttgtgtttagatgcagggtcattggaatcaaatgaggttgtaagggtagagctctcacaaatgagaccagaaccatctataagtaagactagagttctccacttttgcatcaggacatgggaaaaaggcatgctatgaaccaggaaacagatcctcataaaacattgactctgatcatgccttgatttgggatttctagtctccgggagtatgaagagtctgtgatgttcttgccatagcagtatgctcgaaatggccttggagtccaccatagtgtcactacttacagtagagcagagtgacttcctcattgtttcctgtcacccttctcaggcatgttcattatttctaaatggtgttcctactgccccagtgttctagtctctttcagtcaagcaggactccttatctctcctctgtctttctctctgtgtcttactctttaagcaaattcttattttctcatgaagatcaatttaacaatctttctagtggccttttgttcctgctgacacaagtatgttcccaaattaaacctaggtactaatgtattgggaattctgtgctaatgcttaaggaaaaatagcatcgatttttccattcttggactttagttaacttcatgtaattggtctctggttctccagtggttaagcaagtcctcttgggtttttcaagagctatggccctcatagagatcatggctgagttcttttatctgctgcctgaaactgtttcctacatttctggtttcctttatcagagcccagtttctgcacagataaatgaaatcagaaatttctgccttacctcatgaagacacagctgtgggttgtggcaggtaatggagagtagccacctggagctcccatcccttccccaatgcatcctctatacattgttgcttatctctaagaagagacatcctctatgcaaataacttcctatctctttaattcccaataatagatttaaaatggtctattggcctgcccttagtttggaggaatctattaaagcagctgtgtgtagtgcttcagttggataattctcaaatgttctcactctttgttctcacaaaaaccttaaaattgggaattttgtttgtgtttttattagggggaatgccatatgcaaagaccggggggcctgggagaataatgtctgatacatggggtgaaattggaggaagaatccaccaggacccaaccgttggagaggacagttgtaaaggatcaactctgcagggtagaacaagaaggcttagggctgagtcatggtggcggatatctgccatctcccaatgaagaaatgaggtgctggaatcatactgtagaagtggagactgtatgtgaccattttagacaggaccatttgagaagtttcttcacaattatacccactgagcccaggcaggagaagggtctgtgtggcagagcatagaataccatgcttcctacaggcattgactctctgctgactcttgttttcccaggctgcctatctctgtggtattctggaagaatctgtgtgccgccaaaggctttcccatttgaggcctcagtgaaatgggaatgcgtgttatgatgcttccctgtcaggaacctggctcagaaaactacagagctctccatagactctacctccaatcatatattcctggtcttctcttactagacgatctgtgaaatatcggtgcactcagccctgaaaagcctggcttaagcctcagcaccaaggcagataagactatgctgccaagaggccagggacatgtcagcaggtccaagtgagcagacacaggtaaagttaataatcagagttgatctttgcttagtctctagtcctataagccgtacaaatcagatataactcccatgtgcctttgaacatatatatggccagggagccttgaggaggaagttggtgctggcaaacacaagctaattttccatggtccttctctcaataatttgtgtaactccccactgggtcccagctactggggataccctctgtatgacctctgctgatttgatttgaatttaggagcctgtataagtacttcacttacctcttccactcttttttatctctgctgcctctaagaatgaaagtacctctaaagactagaagaagcctttgcatgaagaactgttaccatctgcattgggggttggggggaataaccaggaatgccacattacacctatctagggttccggataacattgtacttcattggcatagacagatatccacaagcatttgataaatgtgtttgaggtcactcagcaagtgggtatgagtaaaatctaattctgtgaagcttcctgttcatttatagaagaacactaggttccccaaaggaccttggacatttgcttcattctgtcttttccatgttcccaactgcactcccgatggcatctctgacttgggcctagattttttagtttggcaactatgtctctgtcaagcccttggctgtgatgctataacctctctgattctcaaagtttcctcctacctagaacactttactggttcaagtcactttgtgctacagtgtccatagatcagccagagatgtggacctattcaagcatgagtatcaggatctgtctagtacagtctatgctctgcatgttttcctttggctgataaaatttgtgtagttccttgctttgataggaaggaaagaaacatagtctccttcaagccacacctctctgtttcctggactgtagtagctaggagctgctttcttcccaatctctccttggcttatctaatactgacacatacatctattcacctgccttgaggaaagcctttctttattcattaggatctagaagagcatcctgagcatagattacatgttcttttcttttctcctatttttagtttttgtttgtttgtttttgtttatttttgtttgtttgtttgttttgttttgttgagacaggatttctctgtgtagccctggctgtcctggaactcactctgtagaccagactgtccttgaactcagaaatctgcctgcctctgcctcccaagtgctggggttaaaggcgtgtgccaccattgcctggcatattacatggtctattacatgttattctttttttgcataaaacacacttcttaacatgtcagacaataaaagcagggtcttccatgctgtctgtatcccttacatgaaaccaccattgacttctgataaagcatattgtctatgggtatacaaagcaatgctagtttctgtcccaggatgggcaagtactgagacatccatcttctcaggtgcaagaactaattaagagaagatgtaatcataagtaggtgcaaacagcagtaaggagaggatcatgaagtaattttcagtatgttctaaatgagaaacaactgaaagatcctacctatcaaactggaagcagcaaatctttctttcccaatgctttatatttagatggggaattaatgtgtgcattcttaacaaaaaagattcatcaatttctttgccagctaatctatctacccattcccatacttgcctcccataccatccatccatctacccacccatccatttactcatctatccatccatccatccatccatccatccatccatccatcatccatcccactcatccatttcaactgtccctcactctatcactcattcatatattactcataatccatccacctagacttatccaccaacccatccatctacctaccaatccacctactcattcatttatttatctatcactcctacctgtctgtttgtctgtctctctgtggatctgtgtctccacagggcattcatcaatcaaagactgatcaatcaccagacttgcatctttacttgtgacaggctccagagataaacactcaaagagctcagagtttagtgaggtaaacatgtctatgaaccggcacatagaggagggtgcatccagggtgctacaggggtggttcaaaagcctatcagtgtctggaaaagatcatttctcaagccagctcttttgaactagaacccatttactctcctaggcagacatagttgtgggaggactcagggctttctttggcctttctgattcatgttctgccttttcctcttctttgcaggcctcttggcattcacacggttgtcgagtgccttaattcattgtgattagaagtgttgggggaaaaaggaaaacgtcttttgagtgtcagtctgggccaaagctgaagtagcaccgtaagctgtgatctgatgtgggagtgaatccgcaggtgtgggcgtgggtcagagggtcttaactgactaaatagcaccagctatgagtgggcagcttagagctccatgaatgtcttaagaaatcttcacaccatcaaggactctcatcttctagttatccttttagaaagaagaaaaggaaaataataataataatattaaaaaaaatgctcaaactccataccagttcttaagtggtttctattccctcgtaagaacatctccactacaagtttgtattccagagggggaaagaaacatcaagacaactctgcagaggtgggtgctctggcgggttgttttgctggtaggattaggaaaagagttagtcttgttccttgaaaacacactcctttaaacttgaattgcctgggacatagtcttgccgtcaccttccccatgtgacagtgacaagttcccagtgataggaatgttccttcctgtgatgttatgtcagcatttgtatacttcaggcacctgaagggtaaccatgaccttgccatggagtttccctttggcttgggacccttgtttagcctgcagtcattagtcatgtaggcacattgcagtcatttctgtagtattcatcctgttcttactcctatagcatgatgtctatggtgatcacaggaaggatgcagctcagtggcagacagaacaaagtccttcatcactggccagcataaaggaagtgatgctctcttactggttatgttataggacaaagggagagctagtttgagctcatggacagacctaatatagcagatgtttttggtgacttcagcttcagttctgagggacagttcctactcaggtttttatcgaggaaccagcttctgtgacatctatactaggattaataggagagcatgtgcaggcagaaaaataatgcttctaacagaagcagttagggagggtggctgatgaggcagatgtaacaggggctcttcctatatatagttcaaaagcctgtttggtcttctcaggagcactgtgaggtcatcattgtcttctatttctctccattatatccagtgatgtttttctgaaataactctagcaggctacttgctgcttaagaatgcagaaaatgatccctttgacccagtttgcgagatatcaaccaggggccccaaagctgtcaatgagtggatattgtctcttcctcgctcttcacttattctcccctgtgctttgttgtcgtcctcttgggtagtgggggggtctcgaggagaaggccttgagaacaaggctctgtcctccatgctgagggccctcctgctcaccccctgccaaacccctcctatccttggattacaaggcaggggaaggttggctccctcatatcggtgttgacctttacagtagtattccagtttctcatttccatgtcccacatggcttgggtctggagatgactgaggtagtgagggaataaagaaagaacagacacaagtacagaaaagctggggtcaggtgggctgtgatggagtggtaccaactaccataacaacctagaatcccggtacatttattatgtgcagtacacatggggaggctgactagtctgagcaggggggtctctataagcagggtactctcgggctgtaaacattaggaggaggaagctacagttactagtatttgaacatactagttaatagtttgtaaacacttgagtttgtacacacagccaaaatttgtagttggactagaggaaggcttagttaactctaagttagttaactggcctgtatgcggaaggtgttgctagtttctcacaggtcagatgcattggtccttgacatggccatgcctatgctgacaatacagatttcttcagcactgtatctgtttgtttcacattcaaactggccttctgcagctccacagacttattactcacataagccctgagatggagccatattccctctatgggctggcttcactgaagttggccaacctaatctacaaatcctagatgtatccacgatggcactgcctatcagacataggaatctctaccacgtcttcattggtgtatcatcactcaggcctctattaactcttggtccattagtgactagggtggtcttgcctatatccaggcataatcaccagctttcctgtacatagctccatcagtagcatatatctctctaagtcctccctgatgcccccctttagcatgtccattaaggccctgcatggctgcatcatgatccctttttgatcctttccaatcatattgttgccaccattatattgaacaaagaagtcagctaaccatggcccttgagctgaagctagcacaccatctattttgataaatggctacacccatttgtttatgaaatacctcttgctacttttaggttttaactgtggtattaaatagttattaaaagagactataagaccctcagtgcctaaagtttttgccatgtggtcctttacagaaaactttggttgtatttaaggccctgacagagacctttatcctttataccttcatgattttacacatattgggcctcactttaccctactcattttaccttcctgctccattacctgaacaggtgataaacctccttgcaagccttgatcatggtgctgatcccacttcttctccttgttgctatggggatatgtcacctactcctattcctgaggcaggttctgtgttctcctagcctaaatcctagcccacttggatgagctgctgaaaacaaacataaagaaagaaaataccagggagccagaggctccttgcccaccaagctcacaggaccaggaagatactgttgctgttggcatcacccagactttcgctgctctccacctcattcttcagtaatacagaagtagagaaagatttgcgcttttctgtctttgtagatctccaatctctacctgtatgacagtgttctgatgctggccaacgccttccacaggaagctggaagaccggaagtggcatagtatggcaagccttaactgcatccggaagtctaccaagccatggaatggagggagatccatgctagacacgattaaaaaggtatgtgaaaggaagcattgctctctacagttgttcaaggctggagacaaggccctcattattgcactcccacttagttggtacaaagctatttcgaagtgtgtgttttcgaagtgtgtgtgtgtgtgtgtgtgtgtgtgtgtgtgtggtgtatgtgatgtgatgtgtgtgtatttgtgagcgactacctaagtcttctgtaggattttctctttgtcactctctagaatctatatttaaatatttaaaagtggagtgaattgatgtccagggtcatgtacttcaaatgtctccacaagagatctggtttcagaaggttaggcccaaagtcacaagtaaagtcatagctgcccgtcttctgtctttccaatgctcctttatgcaaactataaattttcaaaaacaaaaacaaaaaaccttatattaggttgtatggcatgtgttgcttattcaagatcccaccatgtacatatatgtgtgaatgtgcacccatgtgtacccatgcatgttcatgcattatgtacatgtgacatgtgattaaagagtagtgtttcagaggatgtaattaaagtgaattgggtaacccacagaagacttgttagagtgaatgggcttttagaaacttcaaaagagcatttcaggaaatctacaatgccaggaaccttagccacaatatattttacatggtttcggttgtaacaaacatgttccagtgttggtgtaaattcactgctgctcagagcagagcaaggcctctctggaaccatgcagtttatggtgcaccctctactccttgaggtcacagaagttttgataagaatcacaccccaagctgaaagagagaagggagaggatcatgctgactactggctcagtcccacactgcctactgctcctgtggaccttactgaactggagagagacatgggactggcgtgtttaccgcagccattctgtatgaggtattatgctctgaaaatatttttccttcgtctgatgagacttatgttatgggtcgtattgactccagagtgaagatgggagatggtcagcggtctgctcaagatggcagatatagcaaagccaagcccaactcagtgctcttatttgctgcctaaccttaaggcatgtgttgggcacaaatcttgttgacttttgacttcctccttgtgtcagaataagtgaagcctccggagcaggtcgcaaagacaaacataaaacttcaagagtggagagaccaatgcaatcatgttttaatttcatggccagcatagtactagcacatagcaatcgctgtaaacacatcgactgcaatgatagcaggtaaaattcttgtggattcttctgtaagattaagatatctgtgaagcatttatcttgctctgatgtcctgggactgctaatggctctgtcattgctataggtactcacatctgttccctttttaggattccattctctaccacagaaaacttttcccacctcaacatgtcttttcttcctctcctgcagggacatatcactggcctcacaggggttatggagtttcgggaagatagctcaaatccttacgtccagtttgaaatccttggcacaacctatagtgagacttttggcaaagacatgcgcaaggtaagctctctgctcctcatctccaagccttctggcttcagtaccactaaagatggcaacagaagcagtgccttggtttcccagcaagggctaactcgcagaggaagcccactccctgcttttcttctggatgctgctggtgtttctggggatgctgagaaggactcatagagaactttcaagcaggaagtgctaatagcacaaacctgagtccatcatgggtccctgagaatcattttctctcccttgcttggatgagtagctgggctgcctggaggctaatgaggatacaaagttttcccagagttgagaactcagtccagcttctgagacaacgcaactgtggttgaggctggtgatagaagttgtagccagggcatctgccagattcagagttgggggacagagccatggacagaaaaagtgaactgcagggatgatgggaagtgtgtgtgtgtgtgtgtgtgtgtgtgtgtgtgtgtgtgtgtgtgtaggggcagggcactggaatccagggaaagggacatgagagatgggaggataggctaggtatggcttggcttttcatctgatgcaattacaggtgccaggcctaagggtattttcagtggaactgtgtccttcttctggtgggtgactgaggtatcattataataattgagggcctaggatagtgactccaaagagaagctttagatataggctctatgagcctttgtggagtttataatgggaataaaggaagggcagaggctgctacctcattcctggtctacccagctgccttgtgagccattccagaaatgttttgtgcaagacagtcttgtgcttgttggggccagagatcgtagtgctcatgtgcagggactcagtgctctggaaaaggatgaaagcagtcattgattggtctacccgcaggcacaggttcatgtaaccacatgtaacctttgccatatactggggagcggatctgataaggcttcagagataaagggtatccttgtaataatgaggcttaatacattctcaccagagcatcctggagccaagttgagggcaatgcagggataggcaaaatttatgtgataatgggtgagtagatttggttttacttctagaggattagggagtggggatgagtgtgtggaggggtggagggaagagacctgagagcaggacaggggtagtgacagcacatatgagagaactgactctctggggaaaggccagtatgtcctggagtcccagtataatgaggagaatagggtctgtcagccatgctgtgttggaagatggagttatgagttggtgatatcaagtctggcgatggccgatatatatagcttgatgatatcttagaacttaatggtccatttgtggtgccattcagggggtttagtgactatcctgtgacatttaataaaattaaagtgtgattggcaatgtcaagggggttgaggctggcttatgatacctgtaatagactgcccaaaactctgacctttggttgagggcttgagataaatggttgctactggtctgggccaagtctataagaaaaatatattgttgttgttgagattttcatctcttaagaggacagaaggaaaggggaggtcattcggacactctgctatgattgcagagtatggctgtctactgaaatcacaattcacatcagcaccatgcatagctttgtgtcctcatctttgagttctgtaaagccttgtctgatgtctccttcagtatctctcagactattcttttaactcatctccaactccgaggttcccatagggtgtaaaatgttggcaatggtcttctgcttcctcctagatggcttacacttgagccctgtagagcccatgcctgtgctctgctgggcccttcaggtcctggaatgaggggaagtactgtgtcattcactctccattccaggtgtctgggccttccatgttgctacggtaacactcttcaaaaaatcctgaagcctgtcggagctggaatctcacagtgataaggagcttcagagcaggaggtctagatgtaattgagttggaagggaaactgattttcaagtgggctttattttaaaatgtattcttttgtcatttaaaaatttgtccttactagatgcatatttcagttgttatctgtctgccttgcagcttatcattgggactgagaagctatgccggaggcaaggaataggatttattagagcaaatgtttgcaagtatggcctggacacatacaagagagatgggatgggcttcaggatgaagcaagaggaggaggaatgggtgctggggtataggacactttttgaaggtagagtagggcttcagtgccctgctagaaagtagtaggaagtcagagtaccttaaggagtatgataaataatattcatgtaagggtcaatgtaactgagactgggtgtaaaactgagactgggtgtaagatttgaggatagttttagggtgggtgctcagagcaacacagtgacagtgcaaagactagtcctctctggaaccccatagatggtgtttttctgtgactgcttatcatacctggccaccaggagaaccaagtggaaagatgtctggatgcagttgttgggtgaggtttgggcttccgtgctaagatgatgcataccacatatacttaaattgaaaagcagctacagcaaatgaaagctaacagaaaccaaatagttttctgaagctggaaaccaaaaggaatcatctcaattagggaacatatagatatttttcttaaactaaatacccttggaaagacatctctgggagggtgagtcacccccatactttagattaagtgccattaggaggctgtggttactcagcccctgtataggaaggagtgggtgatcacctttccctgtaaagtgctgagcaaatactgactaaattatctcaatcaggaaaagcattcttgtggagggagaactggatggcaaaatcaaaagtctatgagatggttcacagacaaatgttaatctgttacttggagctgtttgacctgcatctgccactaggggcagtgtttgcagggaagtctcttcccatggcagtggagttggttgatttgtttggagggcctccgttctccattctattggtggcatgctttttcaggtcttggaactgttaaaagtccacagatttctacttgctttgattctctttgctcaaacagaaaatattccaaggacagactgtcttattagctagtcagcacaaatattctgaggttataacaagagcaggaccagctatgttggaggctagctactgtaaaatttcccaagacgggaatatatggaaactgcttggcatagaacagggaacaggaaccattgaacatctactatatacaagggaacattatgtatattgtcttattgatgccaaggccattgggtcttcctagtcctgcctttgctgattttcaataatcctttaccttatatgacctttcttaagataaattttcatcctcagaaaacttcttctatgaaacagaggagacaggcagaggaattattctgcctggctcttagcattgagaacattcctgtttgtttgatctatcaccttgacacacctgaagttacaattctttgggtgaagaacaaacagaacatagcttcctgcctcatagttttatgggctatagaaatttgtcacacagagtgccaaaactagatgccagagagatgcagcagtccattgcagccctaaaccagtgtggctgggattactaagttcagtgtgccagggctgggcccagcttccttgcctgccttggatcagatgcccactgtttaaaagacctgagtctgaactgagttttgagaacttcactttcatatgagtctttatattgggagtggtattggtgtctgtgtgatcaatgagagatggcaaacatggatattagattgtgccctgcaacccaagtatgattttcctggattgtgacaccagttaaagcccaggagggccattttccattacctgatcactaagatttcctgcccttctgcatcctaatgacactggtgtggggccttggtttctgctgttaaaacagggtcccctgtgtggcaggatgctgggaaatgtgcccactgcctatagatgttttgaacttcatttccctgggtggcagcaacttgattaattggctcagtggaggcagtgaatatcctgggaagaagggtggggaagtgggaggagcttccacatagcctgtagggtttgctttaagacttatgcactaatccataaggagaccctgggggagcataggagaacttggaaagaaaattgaataaggaccaagagaagtggaagaagtgtttagctcagtggcatttgagcttttctctaatgagaagtctggttacccaggcttttcctgggacctgaagatatgcagcccctctagaggatacagattgtggttagagtccacaagggtttgggcaggaagatctgtgcctctttttacgctaacttctctctgtccttcacattctgcagttggatgtacacctttccttcctttctccctctttctctttctctttctctttctctttctctttctctttctctttctctttctctttctctttctctttctctttctctctttccttcttgtcttttttttttttttttaagtaaggatcatagactagaaaactttaatatctgtggctgtgctggtacttggaagacagagggagaagaggggagagagagatgaagagaaaaagacagagagagacacacacacagactcagagagacatggagagacagacagagacaaaagaaggaggagcaaggggtggggggagatccttctggaacaggaggcagaacagttttgagattctgcccctccccctagtccttccgttgcagtctcgcctaagccagaacattacaccatccccatccatctcttccttctggcctgggcccctgacttcaggttctaccacttatctttgactcagcgccaccccgcccccctccattctacagactacctggagatgcaagggcttgatcctttactgtttcatgctgctgctttactcttccttgtcaactccagttctttataaatgctggggcaaacaggagccaaacagccccgccctgggatgatgtccctgggaggaccttgtggctgctgataatttacagagtgataattgctgatcgcgcagcgattgccacaccatagctttccagttctccctggactccaaaagacatcgttaacattctctccctatctgtggcatggcattataatttatcctttattctcagagttcagaagttgtttttagttataaggccaatttgaaatggcacctaaggtccagactaactttggtgacaaagcaaaccagccttgacctagtggctctccaggggctggtggcaggagcctggaagtgagtacagtacaggtgagatagctctgtgctgagttggggctcagggtctagcctaagcaatgtgtagtctttagtagctgctgtcctaggagctactgttcaaagaaggaggaggaggaggaagaggagaaggaagaagagggagaggaggaggtggaggcatagtctagcagattaacattcttgcattgtatatcccaaataaaatgtcaactcttctgagcccttgtgtgtgccagaactgcttttgacagagtagcaaaccaaaaacagacaccacagcttcatcccaataaagacacaaggagcagatacaattaagtctttcattttaagtcacatttcatcagtggatgatcatttaaggcagaaggctttgcacatgtagataagtgaaatgaaggatttgagagtctactagagtcatgaaactaggatataaagaccatttgcaattttggcctaatttgtttgtggttttttgtgggcctgtgcactggaggcttttcatagagttctctggccctgccaggtgtgagggtccaggcgaacgggagagagtgggagcagggagagggagtcgcctccactgcctccacttctgtctccaccactgtcacttcagttgctccgaggctctgcactgagttaggctccactgagctggtgggagctgaccagccagtgaggagtgcaaggagctgctggaggcattttttggagagcagatctcttccccaagcagctgtgttacagctcttatgacagaagctctcagacgatagagtagttctcacacacctttattccttctggataggagtcttatatacagttttggggtgggtcagggtctgacagtaggtacttcccattggcttggtctaagagcttggggataccttatccacgtgtggaagggctggggtgctgctcctatgtgacggatggccacaaacctctgggtgtgtgtgggggatgtagccatgtgagaggagacttgatgtccaggaacaggcaaaactcccacagtccctgcagagtcaccagggtttctagccttagctcagcctggaaccaggctgtcttttccagcccactgccccacaggctttctcctctccctctatatagggttccagagagtgataggtatatttaaccaagttgtgatttattatatattcattttagggcctgcctttcccacttagtggtattttgggaatattctcatttcttaaattgttctttacaactttgatttttacaaatgaaaatttatcactaaacttatggtaaactatcatatattcatttaattttccataggatattatattaccaaactattgtacaatggcattataataaacatataatatacatgtgattttaaattacatgtatatttgtttctttttacatatgttttaaaaagtgaatttattaaaccaagaataatgattatttcaatgtacttcatacatactttcagggcaattaagaaaaaacttaataattttcacattcattcctatagaaatctgttttatagtcctatgctcgaaaaattcagtggtacattaaatgtttgttaatttagtagcagtgtaaagataacactactaagcttatattttatgagatatagttaaaatataatatttgatcatgtgtattcacattttaaaagttatctctaaaatcttttacttattaatatgagggaaactttcctgttaactcttaaaaaaaacacccgaactcatttaaaaaaaaaagagaatcagcagttatatatgacagatatttgtctcaataaattacttgctttgggactaaagcatacctgtaaataacaaatacttaaagttttatgtggttgaatacttagatttcttcattcaagtagttattctaagttgataattttatccaatttacagagataatttcatttacacaacacttctacttatttttatagtttgattttctttttcttttttttaattaggtattttcctcatttacatttcccaatgctatcccaaaagtcccccatacccaccccccactcctctacccatccactccccctttttggccctggcgttcccctgtactggagcatataaagtttgcatgaccaatgggcctctctttccagtgatggccaactaggccatcttttgatacatgtgcaactagagtcaagagctctggagtactggttagttcgtaatgttgtttcacctatagggtgttgttccacctatggggatatgtttggaatggagcatggtggtgtggctcagctttgtcagtccattgtcactacattgctgccatcatcctgtatacagtatgtacctgaataaccatctcaccctgagctcttctgagtttgtgtagatcctcattagttgatactttaattttttggtagtcttattctcttcttccggattaaatttacttcatttattcacattcttggatgtgcctgtctgcagacaaccaaatgggcctctctagtgctgtgaacataaggcaggcctccccttgctttagaggaggcctggagttaaagcagcttccaggcttgccctgttcaaccatacagggttcaaataaaagtttctagcctttcacacttttccatttggccatttgcaggacattgtctttattttgcttagagtttggggttagctctgccagttccaaagacagcagcctatggaagcagtcccttttgatgggtgtgaagtgctccccagtgttgttctgttgtgagcgtctccaccgtgatgatctgggctgtgtgaggatgtcttccgcctctgcacagacacttgctctttcctgcctcagtgttttgtgttctgcttccagtaagcttatgctttcttcactacgagggcagaagacaactcattcttttctcgatacccagacagaacacagatgggagactcctctgatctggttgtgggttgggagccctagctttgctatttgcacctatttcccccggtttctaccgttcattgcattatttttcttatctacttcacagaaattcttggaaaattcgacagttaaggctctctacagagtgtttgaaaacaatttaaaaaacgcatgttgggacagctgccgtttcatccctattatacactgacagtctctccctttaatcctccatgagacctgactaaggttgttaaatttcatcctcacccagcagaaaactaggttaattaatcacttttgctgtgttctaattaatgaatttatgttatttttcccactgaccaattcctcgtatttactatgatttttaagcctatcacagaaagtcctagataatttgtttttatacttgcgtgttttacaatgttttctctcgagtagagctgtgactggttgtttttctaatggagacagaaacataaatgcacacagaaatgtgcgtatgccttaggtgttccatggtgggctttcagaacatggcattgtcactttcaggaccctacccaggatgtctgtagcatcatgaggaattttctttgtgtcccgttctatttaccgcatctgccactggtcctccttttgttatctatcagccttagttttacagtttacatactattagatcccctctgctcttataattgagttcctgtgtgaagtatgttcatgggagtcattgttatcatcatgaatactgttggactatttcttactgtgcttgaagcaaaagttttattacagttcagatataatgaggcaagcaagcaaacaaacaaacaaacaaaatcctcctgccacactatgaagattattatcataggttctaagttaaaaggtgatacatgccaataaagggtcacacaaggaagaatgtatatctctgaggacagggacaacatggaaatctgtcagtactatttcaagatatacttgtctgatcttgagtctttgttttcatcaacaatcacagatatgttcatttttcacaacaaatctgggttcatgactaaggtgtgtgctggatagttttatgtcagcttgaaacaaactaaagtcatcagagcaaagggaacctcacttcagaaaatgactccataaatctgagctgtaggaaagcctgtgggatgttctcttaattagtgatagatgggagaaggctcagatccatgtggattgtatcatccttgagctcatggtcctgagctctttacagcttccaaacgctgacaccattgcaaacactagcaagattttgctgaaaggacccagatatggctgtctcttctgagactatgccaggtcctggcaaacacagaagtggatgctcacagtcagctattagatggatcacaatggaggagctagataaagtacccaaggagctgaagggatctgcaatcctataggtggaacaacaatatgaactaaccaataccccccctggagctcgtgtctctagctgcatatgtatcagaggatggcctggttgatcatcagtggaaagagaggcccattggttgtgcaaactttatatgcctcagtacaggggaatgccagggccaagaagtgggagtgggtaggtgggggagtgggtggaggagcgtgtgggggacttttgggatagcattggaaatgtaaatgaaaaaaatacccaattaaaaaaaaaaagaaagcaggctgagcaaacaagtcacagagaaaacgtcagtaagcagcctgctccatggcttctgcatcagctcctgcctccaggttcctgctttgtttcagttcctatgctggtgcccttcaaaaatgaatagtgacatgaaagtataagccagataaatcaaccctttcctccctggtttgcttcctgttgatggaacccctaactaaggttgtattgactcttgatcaatgtaggacacattaacatcttgacaatacagagagcaaataataagttgataactacagtgtaccccttagtttatccacaggttctttaatttctctctggaaattatagtttttatgataaagatccagatatattttgtttgatttattcatagatcttgatactcattagcacattatatgtagcaaatattcaaaattcttttctactaagttttagtatgtgattaggaatttatttggtttcatgcattcagtttctttctagtacactgtgtttgtaaatttacattaaaaattgtctgtatatcatttggattctctaaatacacaagcattctgcctagtaataagagtatttcctttcttgggtggagtgggtatattacagatgtccactttagagctgagcagccaatattctgttattttctgcaaactgaccagctgtgggtctctggattagcaccttcttttacaaaagaatcttttttgatgagccattgagagctacactaatctatgggtataaacataaacatataacattgtatctattacccgagttcgttgtcatctattgtttagataaagattgtttccttagattctcaattttctcataatttaaaaattatgattgaatattacatttggctaaagacaatttgagtctatcaaggtgcttgtgaaattatgaactttttattcttactttttcctggtaacatggtaagttacattgactcctttttttcttttttgatgctgctcacttatctttcctgtgtcaggcatgccacactacttggatgatttaaaagaggctttagtaattgctaagactattgtactctcatttctcttccatttcagattattgcttgaacgtttatctttaggttatcatagattcacaggcagtcatcatgactgagtttcccccaatagcaccactcagtgacactgttgttcaataacagagcaaatgtatccacatgaagacaacctgtggatctgattcagagccacaatctcccagctttatgtgtgtttgtgtgtattcacaagctttttactctatgcagttttatcatgttttaggtggtgtgtccactaccacaatcaagacagaataattttctcacctttaagatccctctcattgctcatttattccacatcttccttcttcacatgcttctgtcctgtgtactcctaccaatggacagccagtggtacatgtatatgcttcatctctaaagctttgcaatttgagggaaagttacataaatcgaatcatacagtattataattaaaattctataattagctcttgttcaatcggtgtcattcccgagagattcatcccatgtgcttggttcatcagtggttttattgtttggtcgtttagtgcctttctaagagttaatggcccaccccactatttgtttagcctttgacctctcagaccctagaggatgcctagattctttgcaaaggtgggctcttcagaatgaagctgttatgaagcttatgtgcaggttgtccaggataaatgcacaagaggatgctaatgcagcatcatgtggtgactgtgtgttgagcactgtgagaacaactgttcttctgaataactactattccatactccagccatgcaacgtgagagtgtcagcctcagtggcctttggtgttaccaataatgtttagctcataattctgaagaggtatctaactgtggttttgatttaatttttggctcccttaatgaactcccttgcctatttgtcatttgaataacttctacagttcaatctctgtccaattagttagcctttttttctaagtggatgactgattttgtactattaagtttattagttctttatgtatttcagattttagtcttttattgactgtatggtttgcaagtattttatcatgttttttatttgtctttacattttcagttaaggatatgtgtatgaaacacaatctgaattttgatgaaatttaacttttcaatattttcctcttagagagcttacttttggtattatcttaagaatttttgtttgtttttgagtcggtctatctagatacagctctggttgtcccatcatcatcgtcaatttggttttttgagacagaatttattttcatagggctggctatcctggaactagctctgtagaccaggcttccagagatcttaactgagtctctttcttgattgctgggattaaaagcatgtaccaccgtatcaggcaccctaagtattacttgtctgttcttacaatgcaaagacgttttcttttatgcttttctaaatatattcatattgtattatgtaattctaagtatatgtctgtctgtctgtctgtctaagctttgacttggggcaggacttaagatagagtggggttggcagctgatgtttctgcatagctttctgtagttctcaagggagaggaataagttgaagttaactataagactgtcctcaaactgtatctaaaagtataaagtggcatttctcaaatagcactatctactggaaatgtcttatgtgattgtacatcatcagttgtgaaggatatatatatgtgtgtgtgtgtgtgtgtgtgtgtgtgtgtgtgtatgctgttatccacttggagctacattttcaattatgaaatttagattgaggttttgttttgttagctgtctcttcaccatcaactctttaaaaggctactccatcctcctctgagttgtctttggattttcccatacatcattaggcatgtttgtgtgtttggttttagacctgtcagtctgcttcattgtcagtgtgccagggagtctgccagcaccacagtgtctcaattactggagtttttgtccattagtggttcgtatttgccatagtgaagaatcgtgttcaaagtccatgcggcaccatcaggcttttatttcccttaattgtactatatttgtctgtttttaacatttgggtagtattagagccataaagtatgtttaagacctttgtttgtcttccatcttacaaaacatgctatgtagaatctattgaaattacttggatgttggttaaaaatcttcagcaaagccatttgcagcctggaattttctttttcaggagcttttaaattagaaagccaattctggtggtcagttccatggtggttgaattttgattgaagttacacacacagacacattgaaatttttcttctaaattgttaaatttattcatagagttatttgaatcattaagtaggtatagcatgtgtagttatatctcagtctttcctgttgttatatagtctttctattttttgttgttaatttagccagaagatttaatgatttttttaggatacctttttaattaccctccctccccctacatacatacctttacatttttaaaaatttattttgcatatgtgagatgtgtgcttgtggaggttagtggacaacatgtggaagccagttctcttcctactaagtggggtcttagagactgaaccccggcaggcatgtttacctgctgagccatcttacatctttcttatgtttttcaagaattatcttcttgttttacttttttattctactgtttctccattttcagttttaatactttctacatttttagttattgctttttatttttgcccattttttggtttactttgttttcccttttcctgatttcctaagggagaatcttctattatttgagacagatggtattttgtagtgtaagattttgtgctatgtattttcctgtatcacaacaactttaagctggatttcattcatcttaatatgctttatttcatttgtatgcagttctatgtattctataaatttccattgagacttcttgtctggagcatggattacttagaagtgtaatgttaattttcatatgcttaggggtttttcatctcttctttgtagaattgaatccttttcacattctattatgttgtaagaggctaacctgtgtcatatcggttcttcaaaactcattgagttagtttaataatccaggacatgccttatttggtgaatattcaataagcacttgaagaagcatatgctgaacagatatttgtgggtgttctgcctgtgtggtttggctgcattgaccgattgaatcactgagaatttaaatagtcatgttcactgcttttggtcagatgcaatgatgggtagttgagttctttacccgcacttatgaatgtatcacggtcttttctcagttctatcagtttctgcttcatgcacttagaggatctgttatttaccacatgtatgtggtctcatcagatcattaggtcttccttgtggattaaccctttgaacctggcagaatatcccactttctctctggtaattttctttatctggtaccactatagacatgtctcctttaaaaattaatttcatatgatatgtctttatattatttggctttaagccatacttgtcattgtatttaagatagactttttgtgagaagcatatatatgaatacttgattaaatccactctgataatatattcatcttattggtgtattcacatcaataaaaattaaaatgattggtctggtgaaatggctcagtgaagaaaagtctgtgccaccaatcctgatgacctgagttcaatacatgggaccctcatcgtgacgattttataaactgtgctctgatctcaagagacagcttggcatgtgttcctatctccagtacatataaacatacatacatccatgcctacatacatacatatatatatatatttaatgaaatattttgaaagcttattttaaatatgtgtaataggaaaacctagcagggggctcatccctagagaaatctgattcttcctctaccagcagccattgattatctataaatcttctttctggggcaaagccttgtaaaatttccccaacctgactctgcaggtctatagctgttgtccttatataggtcttgtttaggcaatgatactaaggagatcttgtggatgcagcttccttgtcaacccaagaagaaactcacacacagcagcatctttacctctgatcttaccttacaatctttccacacttttccaggactttccctgagtcatgggtgtaaggattgcatcatagatgtgccagttggtgttaggcatcccatggttagtaattctcagcattttaaatttaaatttttatcatttcccatgttcctttcctccttccaatctctcccttgttctctccttccaactcatgcccttgatctccctctcaaattgatagcctctgttttctattattattgttgcatatacttatgcattaattgtagcatttttatatgtaaatctcatcggtgcatagtttgctggctgccccaatggtttacatttgcaaatgaaagacacacacaacctttatattttgatatgccttaatcagattaatggctgggccacttcctaacctccatgaggttaatccacgtcctgctgataatccagagttattacttactaaatcccatattctatcttggctgccctggacccagttgagccgtcttgggctcctctcctccagttccttcacatggttgccctgtctctctgtcctgcactatactgaagcatagcatctcacctctccctctccctcttcctcatagtggtcctccaccttccttcttcttctctccctctcaagcccaggaaattctcaaatcccacctctgtctgctctgcccagccattggccaccagcatctttatttaccaatcagagccaactgggggcagtgtctctcagtgtcttgcatgcaggcactctcttttaatattgagcggttttgaggaatgtaattagcatttgtgatacaagcagctacaattagtataaaactataaccttctgagttcatttattgttgcttgtgtgtatataattttaagcctgaccagttggtaatagagaaacaattagaagctttatctttgaaagactaattttcccttttcagtcgttgttctttgcctgtagttttttgtgtaggggtagggcaaaacgagatttttcccttccacattagcatgtctactggtcctgttattgctcatggcttgtttagacagccatattgtgtagctatatcatgcatatagcttcctgtcatttccaggagacacactctcacagtatatggcttggtcctttgactcttataatctttctgcctcaaatttcctgttggtctctgagccttaggtgcaggagttgtgttgtagttctatctcttgtatctaggcatcccatgatccttgtgggatgaaaagccaccaaaggctttcttcaattctcttcactctgttcattgtttattttgtcatacagagctttataataaaaatgtatttgctaatctcactgtcatttcctgagctattggagtcctactatcaaagtcattatctcctcttagatcttaaagtgcttcttttatggttccactatggttcctctagtggttctcatccttcctaatgttgtgaccctttaatgcacttcctcatgttgtgctgaattccaactataaaattattgcattactacttcataactgtaattttgctactgtaatgaattgtaatataaatatctgatatgaaggatatctgatatacaacacccaaaggagtagtgacctacatgtttaaagcacctgctctaggtgttctaaagtcttaagtcttacattgtggttcttgatccatttgagtttataaataaataatgtcatgtgtatgacaaaattgtaaacacacacacacacacacacacacacacacacacagaatttccttagcattacctttcaaagaggcttgttttgccattgtatttttgttgccactgtcagtaattgggttgtaatatctgtatggacttgttctgtatttttagttccatatgtctgcgtagctctttttgtcaagtattgcaaagcctctatcattgttggtttgatccaggatgacttttgcctatttgtagtcttctgcatgtccataaggattttacatctgacatttagaattttgaaaggaactactgcatttgcttaataaaatagtattcaatcaatattctctgtattgtgttttctgtccagttgttctttattctttctttaagttctgattcaccatgtttttgaattttcctcttgctgttttctgatgattcatactttaaaattagttttttttcccacatcctttatcttattcatacagactttcacagacttttaaattattcacagaattgtgaataactcagattaaaatatacattttaatttattatagttagatgccattttttgctcttgactaatgcttccaacattagccccttttaaactccacctctttagtttcattgtgtcctttagttaatttgtacatttattttaaactgcataagatactgctattatttttaactatcattatgcagttaccatttaattatgtggccctagatattcactttttcaaatcattagtactcgtacctccaccacatccaagtgtgaactacagatgttgtccctgaaaatacagtcttcttttccctttcttcccattttcctttgataccaccatctactgaagaactccccttagggtttcttcccatgcaggtttactctacaatgcagcctattccctttgttgtgatctttctaagtatacctgtgttcgacagtcaatggtgaagcctgttttcagtgagtacagagttcttggttgctgttgctttcccacgtgtttaaggtatcattgtccgtcctgtgatcctgccccttctggtgcttcccattgataatttcttatctgaaagtaagtagtgtcttcctctccagatggttttacattttcagtattggtgcaatgcctaggtatcactttcctttcatctcccaaatgtagggttaatgtaattcattcattcttcatatttaaattcattagtacttttgtacagttttcagccttagtgaattacttttgatgcagccttccccctctctctgaaactctggtaacacatacaatatttattcctcaccacatgctgacattttccctttatcttttcttttaagtcaacacaagatatttcttttttacttcgacttcattcatataaatttcagatatcttctggtcatcctaaattctccacatttttttttcctgtaattttcttgaatcgggtaacacatcatttatagccattatttggagtacagtgtttccagggtgtacttcaataacatttagtaactgtgaagagtcagaactgaaaaaataaagttttttaggatatcaattccaataatttcatacacatacatgcatatatatgtataagtgcacatgcatatatatgtatccatgtagtatgttttattataataaatatttcaaacctcagcataatcctaaaatctacctacccatctaacacagttcttctcagccaatggccaatttcctttttactctaacaagtttagctgagttttctacaattttgtagaatcatggcttcccttttgttcttttactctgattaagaattttgtgattccgcccccgagtttgattatttcctgccgtcaactcctcttgggtgaatttgcttccttttgttctagagattttaggtgtgttgtcaagctgctagtgtgtgctctctctagtttctttttggaggcactcagagctatgagttttcctcttagaaatgctttcattgtatcccataaggttggatatgttgtggcttcattttcattaaactccaaaaaatccttaatttctttctttattccttccttgaccaaggtattattgagaagagtgttgttcagtttccatgtgaatgttggatttctattatttattttgttattgaagatcagccttagtccatggtgatctgataggataaatgggacaatttcaatatttttgtatatgttgaggcttgttttgtgaccaattatgtggtcaattttggagaaggtaccatgaggtgctgagaagaaggtatatccttttgttttaggataaaatgttctgtagatatctgtcagatccatttgtttcataacctctgttagtttcactgtgtccctgtttagtttctgtttccatgatctgtccattggtgaaagtggtgtgttgaagtttcccactattattgtgtgaggtgcaatgtgtgctttgagctttattaaagtttctttaatgaatgtggctgcccttgtaaatttggagctgtgatgaaaggatggaccatctagtggttggcatatccatgaatccatcccataatcagcttccaaacgctgacaccattgcatatactagcaagatttcgctgaaaggacccagatatagctgtctcttgtgagactatgccggggcctagcaaacacagaagtggatgctcacagtcagctagtggatggatcacagggcccccaatggaggagctagagaaagtgcccaaggagctaaagggatctgcaaccctataggtggaacaacattacgaactaaccagtacccgggagctcttgtctctagctgcatatgtatcaaaagatggcctagtcggccatcactgaaaagagaggcccattggacttgcaaactttatataccccagaataggggaacaccagggccaaaaagggggagtgggtgggtaggggagtgggggctgggtatggggaacttttgggatagcattggaaatgtaaatgaggaaaatacctaataaaaaattaacaaaaaagaattttgtgattcaaaaaaaaaaaaaaagaattttgcgattcatttattctattcccttttgttgtaaaatattgccttctgttccttacagggaaaaaaacccacaatttatttatttgttcatctgttaatggacatttggattgtgtttagatttttactatattcaataaaactgctagacacattcgtataaaaaggctttgcatagacatatattttacttctctttggaactatccgagagggggaatggctggctcatacgacaggtggatgtttagttgttaagaacctttcagtctgttttacaaatgaactatttctattttcagtttccccaagcagtttaatagaatttcagtttttatgcatccttggctacacttggcatagacaaccttaacatttctaaccattataattgccatatagagttatagtgtgttaaaaagtaattttatatttctcagaaagttgcagagacagcttagtacattattgtattcaggtccctcaacttccctaatgttagtttgcatcttacatgtcaggtatgtcaaaactaagaaatgaactttggaaaaatgctactgactatggactttattctgactttgcctatatgcatagtaatgttcttttcctacttctggatcttttctagcaagccgcatactatttagttaccgtggttcccaggtctacatcatctatgtcagtatttagttaccgtgggtcccaggtctacatgatctatgtccttcaacagttttcgcttgttttatgttctttgagcctttaaagaggagtgatcatgtgtttccaaaaaagctgaaacaattatttccagcctctctattagaactttcttagagatatttttgtttgattgcatgagagctatggatctatggtaagaactccagggaggtgaaatgcccttctggttgtattctatccaaggacagacacctgttacccatgtgtcactgctgatgctaattctgatcactagtctaaggtgatatctaaggctttgccaatttaaaataactgttttcctttttatacattattcattagaattaaatctacatctagaccatctctgaaggaagttaagcttcatccttaagtgttagtactataaaattttgtagctgtatggtttgatcattgcactgactagaagacaggtagaatatacattgagaccatacaaatattctcttttcccttaaagtattacccactgattttatcatttgtctgtaccctatgcctgaagcagttactatttctgtgcttcaaagttcttttctatttctttgcttcctctcacattactcaatattcttgtataaagaatatttccccttttcatgtgcctttctaacctcctgtctcctttgaagatttctttattttcatatgcgtataatattctgagtctgttggattttctttgcctctgacatagacatttcttacagaactcatgcttattttattgaggacttgtattaggaaactgagatctcagtgatgggtgtgtctgttgttactgtgaagttaatgcttccaagatcttacaaaggacacagtaaagaattgcatgcttgcatgatattccaggtgaactcagaggtgtgagtttctatatgtacctttatctgtcatctatctaacttttgctctcaaatagctatcacctgtcaattatctaattgtgcttgtccatcttcatctgtcttcatcatttcctgtgtgtatttgtacatctacacatatatgcatacataaataatcatgatttcgaacttaattatgaaggactcacactaacctccccccgtggcttatttgttatttcattctctaacagttgaatctggttccccttgcctgcaaattattacatgtgcaacctttgaatatgttcagtgtcagattcctaataggcttgtgagagacaaattgaccaactataaaacagtatttaactacaattctgttggtatttagcctcacagaacccaagcaaaacaccatttcccaaagctacgtaggtcaactcccctttgcctcatcggatttaaagaggttgtgccttacatttgtaatgcagttacgtttgtgttcatactccactttccaccctgggatctgctgacattctgactttaatttttgttaaatgataaaggaaagcttacagcttgtggtatgcagttctgtgtgtttgatgaatgcataacattgcatatcaaccaatagaaaaatttcaacactctaaaaattgccaaatgtagtccttctacatatttgacctcctaatctcttaactctctagcagtccagtgtcttgtccctacagttttgatgtttccagaacttcatataaattagttacacagtttgtagcctttggaaatctgttttccattatttagaaaaatctacttaatattcaccaatgttgttccgtaatttaatgtctacttttttgtagaatagtatacccactctatactacaagttcatttatttattcagctgttgaaagacattttggttatttctagactgtggaatttctgaattaaaatgttgtcaacatttgtgtaaatgcttttatatgaaaataaatgtcaattcactggaataaactcttggatataggattgataggacatgtggtaactatggatttattttcataagaagctgcccagtcctttatctaagaggctgcccagttttgtatatatatcctcaatgaattaatgtgctctatgcttatattctttctaggattttatattctcagttgtttattagtatcattaattttattattcaaacttgtcatttgcatgttcatgtgtccatttggttgttatgtctactttcaaagtggaattattctaactgattgttgagaaactgttagttgtctatatatgtacttttcttttgaatattttattttatcttctttatttgttttatgttgtgaatatgtataagtgcctgtatatgtgtatgtgtactgtggtgtgctgctctaaagtacagaagaggatgttgggatcccctatatctggagttagaggcagttatagactgcctgatgtagggactagaatatgaacccaggtcctctgcaagcactgcaagtcacttaacagcttagccatctctccaaccttgtccatgtatcttgacatagttggtccttggccctgtgtataagactgttccattttcacttgctttttaatctctgtaatattttgttcttttaaagcactgttatttaaatttagagagatagagacagagtgatacagaaacacacatacactacacacatatatggggagagagagagagagagagagagagagagagagagagagaacgagaacatttaatccttgaaagggaatccaggatacaaaagtaataaatggaccaaagtccaacgtggtaaaccaaggggcttttcttgcagttgctgtcaggaatatgtgtgaagggtcacttagaaaatcatgggtgactcaaaagcagttgcatcacaaaaagctcaccccatcatgggaaaatcctcaaacgtggggttctgaacatgtgcaggcagctagctccatgttctgagaatctcctccaggtagctgggctggtcagtctcctccccgagtgtggtttactgtttttgtgaagctcaggaggggccttaaagagtctccaagtcccagctttccagaatgtgggccttcctttttacctcctgagcctgataaggctccttccttcctcctagaggggatatttcaactctgatgaaactgccagacaacagtggtccaatttgggtttgtatgttctgactttgttaaatttgcctgttagtgaaacagtagctttagtgtaatttactaggatttttctgtataagaaattatttcaattatcaatatagttcttttcaagatttttctcctccctccctccctcccnnnnnnnnnnnnnnnnnnnnnnnnnnnnnnnnnnnnnnnnnnnnnnnnnnnnnnnnnnnnnnnnnnnnnnnnnnnnnnnnnnnnnnnnnnnnnnnnnnnnnnnnnnnnnntctctctctctctctctctctcatcttatattcatgtatcattccaagatggtggttgaaggttatgagttagctgtccctttcttctttgtgcccattcttatggagaagatagttaattctaactattaaatgtgatattattgtaggattcttttagaagccttctgttaggtaaagaaagttcccttctgaccttactttattgggagatatctctctctctctctctctctctctctctgtccttcttcctctctctctctctgtccttcctctctctctctttgtatctctctctctcatcatcatttgatgttaaattttgttgaataatttttagtaagtgttaagattatcttatgaatttttttctccccatctataatatcatggaatggtggtttcaatggttgattttgttgttgttactttggaaagagggtgctgtatattccagggtgactttgcatttgctctctagacaaatgaccttaaacttctgatctttgcccctctctcctaagtaataagaattcaattgtgtaaaaccaaatagttttatgtggtgctgcagatagaacccaggatcttgtatggcaattgaataagttcttctccagttttcttatcatgtctgttctgtttaattattggggaatactgatctctttccttttacctgaaagagtatgtagagtatagtatcatttcttctgacccactgatagagccatctggaccaaatgccatcctttattgaaaggcttttaaactactaagtgggtgccttgaccaaggttagcaggatgtttggattttgtatttcttctcaagcagacctcggtaatttgtgtcttccaaggaacttcatttgaaaggctgtggtggtattttgcttagttctgcttatagatttgggcagtatttgcctcttctatttatttcttgtctaatttagcaatagatgtatcaattttattgatcttttcaaagaaccagagttcacttcatcgactttctctatcggttttctattttaaaccttaatgactttttctgttatctttattattttgctccactctataagtttaatttcctcttctttttccttctaattccttaatttggaaaagttgatgacaattttatgtgtttattctttctttaatataatcatttaattcaatacacacattttcctctacaccctgtttcgttatagtccataaattttgataaatgacactatttcctatctatttctttaacgatatttaaaggtttgtttttattcattttttatggtctatttatttttaagccatctgatatttatgttttaattgtgacttgcctaagcagcatatggtaggcattgccttttccactgtcagcgtgtatgtctttaatgagaatggtctgaatattatcatcctatgttgtcattgacagggctagactttacccagaatattattgattttttttttttgctgttgttgggattgttgttgtttgttgttggtgcatctttgtttggccatccatgtttcttgccttcttttggaatatttgaatattttcattttattatttgctttttagatgtactttctttgtgtcatttgctttatggattatctagagctcctgctgtaccatttcacaacaaatacaggaagctatgactcttctttcttatccttacattgatttttctgctatggtatgttagttatatctgtatgtattgaaaattccactagacaatgtattttaaaattttcaacagttacacacatttaaaagggcttatgacagaagtcagcgattttaaatattcactgtttgctttcttctttcattcctgtgttctcatatttccctttgttatcatttttctctagaagcaatttttataaaagttttaataatgcaaccttggtggaaaaactcctttcttttcctccctcagagaaggtcttaattttattctttattgaaaaaaaaacatcttaaaaacttgtcagtttttgtccaatacacttaataatcttttattagacaaatagtttattgtgatgttttaatgaattagtattgttatataagggaaaaaaacccttttctttgctctcaaatataattggctactcattcaatgtgatcattacatcatcttctgtggctagccttcaaagttcattgtttggttttattgtcttatttttgatgagcttactttttgaagattttatctgttttcatgcaaaataataggatttcatgatcacatacacacatgcatgtgcacgtgcacatgcccacgcaggtgcgcgcgcacacacacacacacacacacacacacacacatacacatacaaagtttaattattctcaggtatctacaccaattctttgttctgactcctcttctccctcatgctgatgaccccctccctctaagtaagtcctcctctggactcatctccaggctttccatatgtaagaacacatacagtgcttgtctttccttgcccagtacctgctctcatgttaggctgatgtctacataacccccttctctttcatgttctacatttttcagaatctatattcagacatatgagaaaacacatgtaatattgtcttccttccctccactacacttttcaccagccacacaccccccccccccttaggcgtccttctcttaccaccttgtcctccttcctctcttgtgtcagattctgaggataagagaatacatgaaattttcctttcagagtatggctgatttatttaacacaatgatctgcagttctatccatttccctacaaatgatgcaattcttctatatggttggaaaaaactctattctgtatgtacaccacgttttcttgatccactcatctgtgtataggtatttaggctggttctgaatcttggatttttataaatagtgctacactaactatggatgtttaaatgtatctgttgtatgttagtgtgtactcctttaaatgtacacttaggagtgttacagctgtgttagtcacaggtttgtttttaatttttgtcaactctagagaatgattttataatggaatattttatttaaaaaaacccttttagcaattttcatctttaatgtgtatttacatttaattttattatatagctgtaaacttgtcacttggcataggccattcatggattttgccatctagaatttttatttttgtgtatttcccttctatgcattattgtatggcttcctaggactactttagtacatccctgtaattatctttgatattacaatttactttttgtgcctattctagcacctatatatctttaatttatcacctactaccttttaatcaatgaattgcaacatgtggattacaacaacccctttgggcgtcatatatcagatattctcttttacattatgattcataacagtagtaaaattacagttatcaagtagcaataaaataattttgtggcttggggtcaccacaacatgcggagctgtattaaagggtggcagcattaggacggttgagaaccattacaagtttacataatattatagcaagtaatgcataatcatctcacatctgtatactttcagtctctactatgttgttctttgttatattgttatcaggttcttacacttatctctcagaccaagagtgttttgtttcaaattttgcttaatatactcaatttttttaaagtgggaaaggatataggttactttttataatttttattgctttgttagcttcacatttccatatgataatgttttcctttaccatttttgttggacatttgtttaaccttcaagtgactttctctacacaccttacatgtgtgtctccttgaatgtatgtttgaatgtgtttgagacaagagatcaactttagctgttatcatggattttgatagtctcccattgagtctcaggaatcctcctgcttctgcttccctgatggtgggttacagatgtgtgctattctgcctggcttcacatgaactctggggatcagactcatgtctttctgtgtataagccaaacattgaacaaccgaagcatcgccaagatccctctacgtcttttataaaaggctttatattttcatggaatttaaatttatattttaataatgattttctttatctgttttcatctttcttctttcttggatgtgttaatctgataatagattttgtctttgatatttccctcttttttgctctaggtgatttttatgatacttttgtcattttagcaatatttgtgcattttgtagtgtgtgtgtgtctgtaagaatgaatatgctgcactatgaagttctgctaaagctatagaaggttcctatctattgatcttccgaatgtaataatcctacactatctcttctaccaactgtcgtttttttaacctttcaggtcaggtctttagttatctatggtggaagaactagagttagtatgacgattgttctgctgtggctgtgattaggattcttttctaacagtaagatatgaaactacctggattacttctttctcataatatgagtttgtatttataattcaccttttatatatgtttgtgtaatatgttctgtatgtgtctatacagagcttcatatttgtgcacgccctcacacatatgtacctacgcaattgaacaagtacacttccagttttatttattggtagtcctttccctaatgattgatcaggcccctaattcacacagatgaatttccttgtgcatgtgcattgaacatgcctgtgtgtgcgtgtgcatgtctgtgtgcttctgacttctctattccattacgatggacccttgacttgtcaccttacaattgcaatgcttgatttgtccagcttctatgagttaataaataataaaatgagaccaagtagggtctttattctcagtatttgttaaatgccttaactgttgtttctttattcttccaaatatcttgtaaatgtgatttttaaaaatcaacatttctctgcctggagagattaatttaaaagaactgttgtctttgtcataggtatttttctttcttagatcatagcttactattcgttgaaagataattcttttgtgaactttttgtcatttttttatcatttgtctctgtgtggttttgctattttaaaatttatttgcactttatgttgctctttaaagatatctttctacttgtttggtgcattaaaatgtaattggtactatatattattatgaatgaataatatctattcttattatactacaagtctcaaaaatcttttttattttataaatagataaacatgtatctaaagtaatgacctgtattttctcatttataatccacaccttgatgtccattctttccataatcatattttctagaatatctactagaatatggcatacagtatgtaatagcatcattttatacttattactttaaagtcatttccttactgtttactcatttacgactatagttattaagtgtcctttgtagatttttctctcagaatgatgttatcttcttatactataatttccattatgaaatgtaacaggaagtcttttttacctaggtgatgatatgatttttctctattaacttacttaatccaattgatgtgcttctgaacgtatttggaactatgtctcagagatttcagtttggatactttgcaattatatatgagtgggactctgagatctccttttgcactgtgtatgtttcactgatgatcaaaatgatactagatccataacatgagttagagtctacttctttttcttataattttaacaggacacatacttgaaaatatatttgaaattggctgtaaaattgccaagaacttccttttggaaaaattttaattattacttttaatgtctttaaaagctgtagaaattttcatgttttatttcttaagttctttttatattaaccttaacatacatttcttttctataacatccaaaaagttgttagcatgaagaaattgataacattcattcatattttagtatgctatattggtaattgtgtcacttttataatttaatccagaggcttatgcttttaattcctcttaaattattcacttctacttcacgctctctctattttagctaaacaaatagcccagatttggaactatagcctctctccagaaatttctggctctgtcagctcatctaaattacctacactgtttaagtagctgtctctgtaaaaagggaaacaataatttgtatacacctcacatggtgtgcttggcacaggtgagaacatgtaaaatttgttttgtaaatacatgtccctttcctcctctcttttctgttacagttttgggtgttattaatattctcattctatatagtcttacagtttctcttctaataagagaattggaagatacattttttcctcaggtcataggtccatttgatatattgtataagtttacaatgtggttgttacttctctattagtcagttgtagctgtctgatttcatatttcagatatacatgaaataatcataaaaattatatggtacagtgtgtttcttcagctcatgtatacattatacactgataaaaatgaacttttttgttagttttgaactattccatttcatttttctatgatatcaaagctttttaaaagcatgttaatattttctctatatatgaaaattttgtaaatgtttttctgcttaaattgtaacttttcctccagacaattatttcttgtttttgtctcatataaaatcagctcttagaaatgaactgtatgtatctgagaatggtctggggttttaaatttgtacagaattatatgctcattaaatttgctgttcatgtttcttatatgtttgataattacatgatttgtgtgactaatgattatggaagtttcttaatatttattcacagaacttcatgaataattttcctttgtttgaatttcttgttggcacttgacctcttttatgcttttatttgttatttttattttatgtgtatggatattttgctcacatgcatgtctcatgtgcatgtttagtgtctgaggaggccagaagaaggtatcagattccctggtacaggggttacagatggttgtgagataccaggttggtgcttggagttgagcccaggtgttctggaagagcagccagtcctcttaatagatgagacatctctccagcccctaagctctttatcatctctttgacttcacgaatgtttgattggttgattgattgagtcactgaatgaatgattgggggagaattttaaatcagaaaaggatgagaagtcacagcttgtatcaggaaaagcaatcacttcaaaattttccatatttatctgtctccatgaggatttgaccccaagggcatcactaaatactctttttatgattctatcaagccaatctaggtttatatctgccatggctaatttttgtagcacctggctctagtacctctcagtgtaggtcctggctgcacccagattctggtttagaagtaaaactttgaactcattactatttaatcctcaccaaagatgtatttaaaaccacttctaatagattacataacagctatttgccatagactgttttcttgtagtatagcaaaatattgggtattaaattcttcataaggaaattaagtttattttgccacaatttgacaagattgaacatcagactatgatgccagcatcttagtagtttctggtggaagcctcatggtaggtagcattgcatggtaggaactcattttagagtggccaatgggcaagcaaacataggagaaactgtggcaatataccagacctgttttgaagcagcgactcttctgattgctaagagcaaatccctgagtaagaacttgctcctgagggatggattcctctctacacctgctgcagcagggaatctgatttcaacatgggtttgtagagacaagctacttcaaaactgtagcattattcggtccatcaatcctttagacactaatgttaataatcaggtaaagggggcattcagcaaacttgctccctttgtgagaattgcttttctccgtggacacccatctcatcaaatatttttggtgtgatgtcacaagctgtcattcaggatgtgctcagacatatgctgatgaaagtcattactgtctcttttgtgcttgtgatcctggaaacattccccggcaggcatgtttcctctatcagcactgagactctgcacttgaataccagggaagggagtagttgtgcttgctttcttcttgtgatgttgtaaatcatataaatgattaggttgctgatcatattaagaagctacgatgatgggtgacaaagttgatatttaaatcattatggcaggctgtgtggaggctaaccaaataacctcagcaggggaaaatctacagccctcatctgggcaaaaccaatcctcggtaacacctgttctgacagagagattaatttgacttttccaaaagtgcgctctgagcagcacttcttcctagagatgcttcccggaggaagggccctggggagagctcagactgggaagtgccctatgttaaatctgtcttagcatgattcacaacacacattagcgcattaaaaccctgcagtaaagaaatcagtttaattttgtgtgtgtgtgtctagttttgaattcctgagttcatttgtctcggggcttttgctgtggctgttgtcccatagtgcctgtggcccactctgtatatatcaccaggctacattatcccaaccgacagcactgagctttcattctccatatggattactcccactgtaacagtgacttcattttttcctgtttcttactttctgcctggaatattattttctctctggtgatggaatagttaatgttatagagtgtggaataagccctacctggcataatagagatgttaaactgtagagcccagagtcaccatcaggcagcctgcaggttggagactataatacaagcactgtcaggccaagaacaggactcttccttcactgacatcactcttgaccatctttcaggactgtgatggattgtatggatagagttgtacattttgtctcttaagggcttaaaattaaaagcaaccatcactcaagtgaaaagccaagggccctcgcctgcacaggaggataactaagggattctcagagagcaagtgattgattggtagagattctggtacagtttaaccaagagagtagtgcataccgactttgctgggtggactggagataatttgggagcagtaggctaattcccagcagagagttaatcaggtccctacagcacaaaggtgtacttaggggtgtaacggtacttgcttccagttgaggcagtgggggtcctgtgtcaggatcataaactcttttagagataaagataaaagataggcactgagagactgcagggaccattcctcctgcccccaacacacacagaacccagagagtaggtatatatccacttgcctacaaccaacacctatggttagctgtaactgctagcctttgccagccagatgctggatcttgtaaaaattcccaaggtgtgtcaggactccagagcaggctctgccttcaaattgggcacataactcatcctgcatcatccttgccatggtcacagtaaagggcaggtccttctggatttaagtcacttttgttttactttctgaaagcctcatcttctgatgcagcagactttggattcccaagactctgtggcagaaatctccaggaggtcattgccattattcttttggggaccccaggaactggaagcttttcttcaaggttgagatgactgaaggcttctcttgcgaaggcatggagtgagcctgcctttgacctccacgcggacattgaacctcagctgtcatttcatatagctggcaataccaggaggggagaaaaccaagggtttcaacaattctcagtgttagcaggaataagccctgcacccttccagagaagaaatcactgtctgcatttcagagcacgagagctgattctggcttcccagtgctttcttaacaagtacagccaagaggaagaaaaaaaaaatcacctaaaaacgtcaaaagtcaccttgccagggctccccccactggtgaaaatatcaatatgtgatctctttgagttctgtggcatcatctagacagggacaacagcgctgcctttcagagctgatgggtacagacagtgcttctcttcctgcagctgccgctgttgctcacaggaacttcataaggcaagatggctttcttaggactctgatgatggagtgtgattaacctgctggggaagtgatggatcccaggggggcagagatccatgccccgtggaagaaagatctgggaatgtcatgcctccctgtctgtctggcttgagtggagatctttagctcaaggccctggccacccttccagtgcctaaggcgaggcttcttttctgggccattgcctcctcagcccttctctctggcttcctgcccaggcctctgggactaagctgtactcttggcttttaggcttcctcccttccctgactgctgggctggccctagtccttcctctgtgactcctaaatgagtattcgagtcccttcctggctttgttctctttctaaaacccagtgttagcttttcatcgacatctgttgttttataatcttgtctttgaactccagtatatcttacatctcttttttccctttcagagaccttgttatctgtaaattctttgaggttgggaatgtatttgtctaaactcttaatctttttatctccctcagagataattctccacaatggtgtttacatttttcattggcttttcaatgctcctttcttccctgagctagcttctccctacagcattcagtgttgggggctgaggggggtcctctatttgcatatttactgtgacttccatcctgaatatcatcccatccctgaagagcaataggtctttactaaagaaatagcagggaacgggtctgggccagggagcttgctaggcctgccttcagctctggtaacttcagcagtgctcccttgctgagtctataatttactgtactaggaaagtatctctgttgtttaaggatttagaatagagggaataattttggaccttttcatcagatacacactttttttttgcatcctgaaccttggccttgagctctgttcaccaagtctaaggtgcatatctcaagaaaaatgcaccctttgtctcattcagtcccttcttgctgttggaggctgagcagacctcagtgaaattactcacttcctccatgagtccccagtagcatggggacatctaggatatgctcagtgcatgacctcctagattgatgttcatagggctaatggaggtctgactcattactggccgggatgctttgagacctacaggcatgaaattagctgtttgtttcaaaagaaggtggagttagaggggaggggcttccaagtccctcctactgctcaggggctattggcagttgaggaaagagtcagttttctttgccagtgtggccctttggagattccccagccccagtggatgaacctatacccatgtcatatgggtaacatgaattagactcagtgggataaaataataattgaaaaaaagaaggaaaggaaaagacagactgcagttgaaggggaagctatagagaaagtcacctaggctcttaggaaaactcgggctcagtgtgttcctgttctgccccttacagtgtcaagaactggctgcttgctatcttgggatctttccttcacagaggagaaaaagctgggcccagggggttctgtgtagctcaagggttaggtgtggagcttgagaaaggcatggttgatgatgatgaggaggagtccgatagctcactcagtggtaacttgaacagcagattaaagctgtctgtctgtcagcagtcaccttcttctcagccttgggatgctttctttgggaacattctggtatcctttcctatgtgcccttgaccaaaccaggaaacagctagggtcaaaggcctggccacccactattatctatacagcttcttgtctgtccttaaacaaggcttggcccaaattcagtgacacagcacgtgctgattctccatgctggtgggtcttgaaccctactactcagtccatcctatttgctatcctgttgcctacacagccaggtcatctctgtgatagatgtgttatctgccagttccaagtctccctgagagtttctctgtagatgtatatcttatttgtttttggaaagcctcgtgacacctttttttctttttccttttctttttttgagacctgaaatgctaccctgccctccatggagcagccagctgccctgaggacaattgcctagtgacaaattgcagccagctcctttgcaaactatatatcatctcatttaatcattcttcagcttgctctatatttattgaggttctggtatttgtccatcatgggattaggtgatagaaaatgacagcagatgaacggagatgcagctgtgccctgcctgccacttgttgcagctggtggctggctcttgccacctttgtctgcaggtccattgcctccgtgcactatggtggaggaggtgggtctatgggagagcattcagaaatgctctcagtcttgcttcgtagttcaggacgtggggagcttaaggtccagcttctagactaaagatcttctgaggcctgaagcactgtcagcctaaggagtagaaaaagacagggactcctcaagatgctgggagaggcatgaataccaaaggcataagaaggtgtgttgctattacagtgtccttggttctaatgtgaggggcaaacaagagagtaatgagttgtacacgagatttctgtgaaacactctagttagtctgtagtttacacgtactctgccagtgtgtgtggagaagggtatccatagcagactgagggtgaggtattgtttacctcttgctgtgtctctgtctctctttattaagcagctcccaatttccacaagggctatctcatccctgatggtaggtgggtctgaatcaagactgtctcctttctttttttccctgaaggctgattgttggctggttctgttgaggccaaggaaccacaagggtatgactgaaagggtcccatctcaacttggctgtgcaactcaaagttctgattaaacacaggaagtgtgcgttggtgctttgtgacatgtgctgttcccataggagacaattttagtcctcaatcccctctttctataaattgagcttacacccagtggccaggggtgaggggacccctggattcctcattactcttttgtcttagacattctgcccaaatatagagacagagaggcccttccactctgcagaactgccaacatctcccctgtggggttttgggtaaggaagaacctatatgcaagcaatagggcttccacagagcattagctctggcagatgtcttggcctcagagccagctcagcagtttctgctcacacagtcagaatctttaaatttgaaaatagatcataaagacacacgtgggtgacctaaatccagagtggggcaccccgggggaagacagagcttatttatttttatttatttataccatacttcatttccagaaaaggattagcgagagcttatccttgtgcagaaataatgtacaactggagaaatttttaatttttttcctaattaagaaataggggaaatcagggcaagaagaaaatgagggcagccacacaagatgaagctggtggaaagatagctgtacatcatacacattccaccctgcctacttccaccactgaattccctagcccagttctttctatctgctgcgtcttggctgggtggacagccttgaaaacagcccatgtcttcctggttggtatagtttggtgctcatctgctcatatggcaatgattggccaatactccaagtgagccctagagacttctgatgcacctgcatactatactagcaacagtaagttggaaacaggtcctacttaaaggctctcttaaggcaaaaagaggtcaatgtccagggaagatgaaccttgccagatactctggcctgggcaagtcttcagttcatgatttacatttgaagaactaccacttgtctttcttcattagagagtaagtcaaaataaccaagaaatctgacactaactttcagagccagcactatgctaggagctgcagccaggaacatgagaagataggtcagtctctgtttttttgacagtctgattcttcaagggagatacttcataagttagcccacacctggtcaatggtctcccaaatgctgaataggcacaggagctctggtggtggtggagaagggcatgcccatggtaagatggttttgcatttatctcatctgctgaccctttctaatggagcaacagacaagtagaacctaaatatggagttgcagaaagctacataaagagccaggggaaatacattccaggctcaggaaaagacagagcaaatcatggcaaatcttgagagcactagtaacagacccacaagtagctattctgccttaggtttgattggctgaagacagagtaaagactgcattttctctgatatgctgatcctgtctgacaagaagaagagggaggtgaaataggagctagcctgatctgaggaagcccttgaagattttgaggctatgagttgggacagagtactaagggcagagggactctcatcctttcagaccccagggtccaagtattgaccttggctaatagcttttgttcatgttctctcagaggatggcgatgagtaaatgcacacaagagatcttcactcattgcctcaatttacccatcagtgatcaaaaggaattctccaggaaaaatgacagctaaacccaataatgcatttgtcacatgaaatgtctttttgttttgcattatcagtgatatctgaatgatgcagatcagacgtttcctatttatctcctgccagataccagccccagagagccatctgggcaccatgggcagatgtgaatcccatggagagacgctgacttcatgggtcctgctcccagagacaggatcctgaccctctgacacaggaacagctttctgagacagcatcctgcaatgtccacaaggcgagggaagttatgtgtttaggcacgctggcctttggatggtttgtaacaggatttgatatgcaggacaatgtgttgaaaccacattgttgaggctttccatctaggacacatctgggctctgatgttctttctggaacatagaaagcaaagggcaggtctttgagtcccaaagaaaagcagctcaaccaattatttggaaaattttaaggaaaatgttggagttgtgatggatttttcttgattgtagtaagcagagatgactctttagccatgaaatctgagcactataacccatatctagactgggaatttccacatttgccggggtgaggcaatctggaattaaaagtctgttggtcagtgtctaccaactaagactgcaatacagggattcagtttcctatccaagtagagctcagttcccatccttcagtgctgtttccagctcaagtgtcttaacaaagaagcagggtcctctcctcccttcctccctccttccctcttcctctctctccctctcccctttcccctccttcctttctttccttcactagaccccacaatactatcctctctctctacctagcacttaaatgaaccttgcctctgagaagactccctacaccttctgccccacccctactgaaaagtttccttatagagaagtaaatcaaggaagtaaaaggccagactcttctaggcatccaataacttctgactttttcattaattcatcaagtcttaattggtgtctgctatgtgtcagacactctgctaagaggtaattaaaaagcaacataacttctttttcatgaattttatggtctctggagggtgaccactgagtaagcagacactcagaatgtgataagcattttgcagtagtgataggagacaggagcagacctgtaagcggacctgaccctcagggaatgcttttggacccaaagaggactttcttagagcctggaacacatcatcatcatgtgttgaaagaaagcttagaatggaaatacttgcagtggtacctatggtacagagcattagaaaaatgccaagaaaggggccttagcagtaggcatcacattcagtatggctaggaacaatttggcatgggtgatgggaaagatctagctagtgtgcaattgctgggctgggcatagactggcaccaacatgattcagagtaatgggtggctctaaaatactgggttaaagaaggggaaatggggctgttggacaagagttatccattactctccagttctaaatgaagcatcctgaacagacctctaggaggatgaataggaatgagatacattgactttggaaccagtatgaggaagaggccttgccagtggcagtagtactgtggggatcagacagaagacacaatgcaggtgctagaggcagagtcgtgggggaggccaaggatctccacaggttgtttacattggcgtagaaaggatgaaagcactgcaggtctgactgggccccagaatggcagggtaagggagagagtagacacttttgctgacagctcatcctccctctccaggcattgtctgccccggacagtgtgtgatctcactgcactatcacatgaatgggaatgacttctccatctgacctgtgcagagaatgaagctacacatccagtgtcactgctgtccttggtagatacagggccagcgggcatgcaagacaccaatggagacagagtccggagcaggaagacagatgggagagcccctaccaagcaagcagttcaggctagaacttgtcaggctacagggccagccctgccacaatcctactctacacgtgggcatgacctccaggcaggagggtgagaggctctactccctaatggctggtttgttttcaggttgattgcctttccctcctaccacctctgctctctggccctgccctctactgccagggccctaggaggccatagtggcatccaatgctcacagcatgttcattgtgttcggcacaaatctccttcagtcagctagtctatctggggagggggagggagtgttaatctaatcggccctttccctgtctataattactgtaatctataacaataattatagtccattttattttagtaccacttatctaaatgtggatgtgcactagtgagactgccagtagaaataagccccttagtgaggtggcagagtgaagagagaaatgggggcgggggacagtagcgcctccaaggcttgcgcagttccagagtgcaacttatgagcccttgcctgccccccaaggacaccccactcttctgtaggatccagctgcccacaagtaggtacaggcctgtgccccttggaaagaggaagggctacctggtacattctaggattctgttgctccttggggaggggaatatctcaagccagagcagagaagggacctacacggtcccactgcatccactatagtatggttgtaaatttctctgggagtagggataacatcatccctaccaagtttctcaaatgccagatgcagcatctggcgtatggtggaaacctagtgagtatttcatgagcagtgtacaagtgacagaaaaaggcattgtataatttaggttggtccttgatttaagcagctttctatctgtgaatcaggacacaatgcctatgtcatttgggaaagatcattgcttaagggaatgacttatttaaaaataaaattagtttttgcagtgtagtatagtataatagggccttagattggaaggttggatgcannnnnnnnnnnnnnnnnnnnccaccaccaacaacaacaaccacgaccacttggtaatcagcgaaagcattcagctgtacaggtggccctcctgggtatcagataggcttcatatttattctatcctaaagaatgaacagtgtacattttatagtagacatcctccactaatttcatccaaagattggactttaccaattgatgatgggcctcctaaaggcactgtcccctgtgctagtaaaaccaagcaaatacatatccctgatgcctttagctattggctacaaccacccaatgtacagtttaagaaccatacaggaaaaatgcagaaaatgctcccactgtagcgaaaggagacctgttttatctgcactgcatgcatgcagagcttctaagatgcctctttaggtgcgtctgccttgccactggactgggttctgctctctggagaaccttctgtgttttctgagtcccttgatcctctctttgaagttttattagcctccagagatacatgcatatgggtttgtggattatttatatagtcaaggcttgtgacatctcaaatactcaaacagataaacatggccctgatgttatcatgatagaaaacaatcctttaatgaatatataccatattttaacatgtttatcttgattccagacacagaagccatctaacataattgtttctaagtatttcccatatattttcttaaaatatctttattatgttatctcttttcctagaaattcatgatagcctatttctcactgatagcctattttaccttgtatgattgacatatcagagatcaggtacctcacagtctcccaaccaggagattacatggaagttaaacattagatggccttgctctgataacttcccctctctcccctgatgctgctaatgtcttgtcccttagccatctttccagtctttcatactttgctgtagctaggtgtttttcaagttgttcttccctgggcactcttggcttgattttgacctaaacatatgtcttatgacatttttacattttcagaataaaagggatttgatcttgctttaatttattaattaaatagtcccagtgatcagagtatatgcatgtgtatacatacactcagcacccttgactgcctaagccagtggcagcactcggattacctcacaataacggtgggattcattcccagtagaaccttcccttatttaagattgtcacaatagcctgacgtgttagtgctgctccttgatgttatgacaaaatgcttaacagaatatcttgaagggaggaaatatctatattagttctcagtttgaggggatacagtcctttgtgatgagaaaggcatgactgtagcaacctatatggtagacctggaagtggggccatgctataacttataaggctcaccccaatgacatagttctcacagctaggcttcatcttctaaaggtttcatcattttccaaaaacaatgataccacctagcacctaactgttcaaacataagaaactatggggtcactttgcacattctgtacctgtccttataggcttattgccatcttttgatacaaaatacatccactacagtttcaaatggcaccgtggttttccattccaacactgtccaaagattctcatgaaactcaagacagtttcttaactataatccctggggggaactttacatatttccaatatacagtggcatggagtaatctgtctcatttgaaaagaaaggaagagagacagagcaaggaaagaccggaccaaagcaagactgaaaactatgaggtacaaactctaactcttgcagctttgtatctggcatttgtggcagtattgcttgtgcagcttatctcagatcatgtcatcctgaactctgctgcctgaggcacatagagtttccatctctttggatagatttgttttaagcttgcagctttcctaggtggatattctatgctatagtccaacatcctggaatctctgtaacaacttattcttcactacatgtgatagcattattaatatatatgctataataagcttattagctgggccattcccaaacatccaggtggctaacacactctcccttacaatattcctgaattattacttattcaaatttatattccatcctggccaccccagacccagtctgtggggtgggagctggggtcattctttcccaactcttacatgttttatatgctgtctccttctgcacttctcagtcctgatcgttttgcttttctagcatggtggttctcctttttctcttagtccccttgcccatgaattcctaaagtcctgcttctgtctccctgctcagccattgtccactagcaactttatttaccaatcagaaccaactagggacagggaacctcagcatcttatatatggattctcatgaagttttgggaacccaaataacaaattgtaagcattactccaaatatacatttcccccattttgtcctttaaaaatgccttttctctcatttatacaatgaacaaagttataacagttataatatatactaataacatccagtccatcaattttgtcaatttaggtgcattattctaacatttgccctaatttaaagagtttataatttctataccgaattatattctgattttaacttgcattaccatctggaaaccatcctttctaatttacatcatcttcttcaatgctaaacaacttaagtttatgtaactagtcttcaaccccatcagagatctgagaatgaattaaatattacctgaatatataggaagcacagaaacatagcttccaaaacaatttgcagagacagctgactacctggactgtcccctattcctcaaaacattggagcatttgtcttcagtcttctggcccagaaccatctgacagacattaagtgaagcaggaactatgaaggactagcttactctatcttgacagagctaagctgtcaactatcccacatcatgtgtcctttcttggatggtattttttgtctgtagatgaattagggcaattcttgcccagtggttatcttgccacaactggaacaactctatgtgaagtttatgatgctaaatatctcctttgaaccatgaagggggtactgtcaggaacaggcacatctcttagtcaaaatcgaataataaggaaatgattataaatgccaaattctgtggatttctgatgcttttgaatatctatacaaagtgaatctgaactattaaaccttgacttctcttagctatttctatctgaataatattaaaaatactttattataattaaatccaaatctaatataaccatgagtttactatatggcttttaacttttattacttaattatcccaatctgttagtaatagcagctattagaaggactgattctaagccttgtattcttaaatgagttgcataggcacaatgtctatctaagcataacattattaatttcaaattttgtatcaatattaaaaaatttataccaattaaaatctaaatctctatcaatatataaattccataccaatataaaaaatacgacttcaaatttgcatcaattataatgatctctaccaacataagattatgtttaagaatctttaagaataaacttagtaatccatcccatatatctattttcttataatattactctatccccctttttcccttcaacccccttccttttactaggaaggaaagggtagagaagaggaaaggaaatacagaaagcctcaagtataagctctctatttagtttcctccctgtctaaaattatgaccatttccaaattatcccttaaaatgacaacctatctataatttataaaataaccataaccagacacccaaacccagggatcgggatgccactccatagctgtttcctgcttaattgggatgacagattttttttttaaggtttggagaggtgtaggaaaattagaaaaattgtttagattcaagaatgccagctttactatctgttattcagtctttgtatgcttaaaagttcagggcttgactgaagttctgacttggatccatctgaaaggttggatgaactaaggtcatcaggcattaccagctatttcttttttttttccattttttattaggtatttaactcatttacatttccaatgctataccaaaagtcccccatatccacccccactcccctgcccacccactccccctttttggccctggtgttcccctgtactggggcatataaagtttgcaagtccaatgggcctctctttccagtgatggccgactaggccatcttttgatatatatgcagctagagtcaagagctccggggtactggttagttcataatgttgttccacctatagggttgcagatccctttagctccttggctactttctctagcttctccattgggagccctatgatccattcattagctgactgtgagcatccacttctgtgtttgctagcccccggcatagtctcacaagagacagctacatctgggtcctttcaataaaatcttgctagtgtatgcaatggtgtcagcgtttggatgctgattatggggtggatccctggatatggcagtctctacatggtccatcctttcatctcagctccaaactttgtctctgtaactccttccatgggtgttttgttcccaaatctaaggaggggcatagtgtccacacttcagtcttcattcttcttgagtttcatgtgtttagcaaattatatcttatatcttgggtatcctaggtttggggctaatatccacttatcagtgaatacatattgtgtgagtttctttgtgaatgtgttacctcactcaggatgatgccctccaggtccatccatttggctaggaatttcataaattcattctttttaatagctgagtagtactccattgtgtagatgtaccacattttctgtatccattcctctgttgaggggcatctaggttctttccagcttctggctattataaataaggctgctatgaacatagtggagcatgtgtccttcttacctgttggggcatcttctggatatatgcccaggagaggtattgctggatcctccagtagtactatgtccagttttctgaggaaccgccagactgatttccagagtggttgtacaagcctgcactcccaccaacaatggaggagtgttcctctttctccacatccacgccagcatctgctgtcacctgaatttttgatcttagccattctgactggtgtgaggtggaatctcagggttgttttgatttgcatttccctgatgattaaggatgttgaacattttttcaagtgcttctctgccattcggtattcctcaggtgagaattctttgttcagttctgagccccattttttaatggggttatttgattttctgaagtccaccttcttgagttctttatatatgttggatattagtcccctatctgatttaggataggtaaagatcctttcccaatctgttggtggtctttttgtcttattgacggtgtcttttgccttgcagaaactttggagtttcattaggtcccatttgtcaattctcgatcttacagcacaagccattgctgttctgttcaggaatttttcccctgtgcccatatcttcaaggcttttccccactttctcctctataagtttcagtgtctctggttttatgtgaagttccttgatccacttagatttgaccttagtacaaggagataagtacggatcgattcgcattcttctacacgataacaaccagttgtgccagcaccaattgttgaaaatgctgtctttcttccactggatggttttagctcccttgtcgaagatcaagtgaccataggtgtgtgggttcatttctgggtcttcaattctattccattggtctacttgtctgtctctataccagtaccatgcagtttttatcacaattgctctgtagtaaagctttaggtctggcatggtgattccgccagaagttcttttatccttgagaagactttttgctatcctaggttttttgttattccagacaaatttgcaaattgctccttccaattcgttgaagaattgagttggaattttgatggggattgcattgaatctgtagattgcttttggcaagatagccatttttacaatgttgatcctgccaatccatgagcatgggagatctttccatcttctgagatcttccttaatttcttaccagctatttctgaacctgtttctccggaagcagcgttgggaggcaggacctggagtagcagggcatcttaacatctctgcagacgaagcttgtcagagctgtacatcgtataatatatgaatcttttaaaattatttattttacttattttacactcatattttattccctccccccatccaccctctgactgttccacattccataccttctctacaccaccttgtctccacgtggatgtccccacacccaccccacctgacctctaaactccctggggcctccagtcttttgagggttaggtttttgcatcatttcagaatgaacagagacccagctgtcctctgctgtatgtgtgttggggcctcatatcagctggtgtatgctgcctgtttggtggtccagtgtttcagagatctcaagggtccagattgagactgctggtcctccgacgggatcaccttcctcctcagcttctatcagccttccctaattcaaccacaggggtcagctgcttctgtccactggttgagtgcaaatatctgcatttgacttttccagccgcttgttgggtcttccggagtgcagccatgctaggtctttttttgtgagcgcttaggtaatatatgaatcttacaaccaaaattatagaactactaagatatttttatggattgtgcaaggtacacagataatttcaggaagaaattttgttccttgtttgagcaggtgaaagataacaatccttttatgagttaatttgaccagtaaccaattctgataaatctttgttcatgccgttggaagggtggcatgatgaatcttaaggattccataaccaacaagacctattgcctaattttagctcaagttttggctagagacatttttatgtctaagtcagttacagggctgttcccatgtggaggaatcagcaaatcatgttatctgtcctgtttgatcttgtcaaatttttcttttctgtctttagacaagatctttaggttgtcttatcttatcatatctgatccatattactttggaaggggtctagagccttttcttattattattaacacaaatacaaagcctctctcccaaaatagcatgtcctttgtccagcaatccaaaatcataaaaagtatagattagttcaaactagcagcctcttttgtctttaggcttcctatattttgacctttcttgcagaggatttttaataccatagccaccaaacttataaccacacacattttgataattaaaataattcaaagaaattaaagtagtctaaacaattattatctgtcgagactctgctccttcattatctcctgtcttgttcttccatgattaatttttattattattttatttatttataatccagccattgccatcacacttccagtgctccctcccatagtttctcatcccattctttcccccaacctgtatctctcggccttcttaaagagaatctgtctttgccatatattgccggaccacggcaggtttctgaaatcttggtgcgaacctccatgagtgtctttactcttttatttttatgtgcctgcagaaccagtagcacacgagcaacacaagtttctatttccagcctgagatttagcccacatgcggtataatacagtggccactgatgcctcggtagatgaacctatgaaaatgaatcccttgaagttgctttttcagcagtgagctcatgacactgaactttcctcaggcactctcttttcagatcaatttgctttttctgtcctgtagttaccagttgctaggatattggtctctaggcattgttcctcttttctccatacaagcttcatgagttcccactaattgtgcatgtgtaacattattagctactggtgctttgtctgtacccgacatgtctacagcttaaacttactcttgctcctttcttacctaattataaacctttcttagctttctgttccacttgatgccctttgtcattccaagaccgactaagaccaattagtagtatccatgatgcaacttcaatactatgcgtctgtataatttcctctgctaaacaaattagtctatttcttttgcaatcagtctcactcaggcattcagcacattttcagaatgtatccaggtgctttgctgtattgtaatatgaatgacttctagtctgattcctgatgtagtattctgatacctcatgggcatactttccttgatatcacagtcttctaagcatccatgagtctgtctctagtatgcactactttcggcattccagggcttttctagtcaggatctctaaacttttccacatccctcccataaactagtttaaaaggcctaagaactacaaaggtttatcacaaaattagtacttttattttgatgtaattgttgttgttgttgttggtggtggtggtggtggtggtggtggtgtgtgtgtatgtgtgtgtgtgtgtaagtgtgcatgtgcagatataaatccatgtctatatgcatgtggaacaaaaggtcaatgttggacatccttaattggtatacattttatttcttcagacagggtctttcagtaagcctagagctcactgattaggctagactggctggccagcaagacccaggggtcctcctgtcttcatctccctaatcctggaattgcagatgcatgcagccatgcctggcttttacataggaggaagttaaggatcaaactcatgtcctttgtttgcatagaaaaaaaaaaacactttaccatctgagacatttccagagtcccaatcatcccacttcttggcataatattattttctattacttatttgtctcatcactgtagcacattatctgatcaaagaaacttaagggaggaaggattaattttggctcatggattgagaggttgcagtcaattagaaatgggaaggaatgtgatgaaaatagctccctgctttctcctatgttagaggaagaaatggagaaagatgaatgccagttgacttttattttaaaacaatgtttttatttctatgtaaccagtctataatttctcactatatcattgtgccttcttactaattctcattttcctggccatacaatgacatttatcctcgatggttggtactagttacagaaaaagtaagactacattagtgaatagtaaagcataattttcataatttgtatttgatttgtgggagaaagagcagatgttattgctttatttagagtggttggaagaatatacatatttccaagttttataaagtcattaatgcagtttaactggtacacttgatctaaagtaaataaatggtttcgttagaaactttagattagatgtagtttgataaaagcattgaccaagtgataaaccatgtcacaaatgattttgagataccagtaacattaaaagtttcatcccctgccaaatgaaagttgtgaaaaagttatttttttcctgcatgaaaagtttttttattagatattttctttatttacatttcaaatgttatcccctttcctggtttcccctccgaaccccccccccatcccctccacctccccattgctcaccaacctaccctttcctgcttcctggccctggcattttcctacactggggcatagaaccttcataggaccaagagcctctactcccactgatgaccactaggccatcctctgatacacatgcagctagagccatgagtcccacatgtgtactctttggttggaggtttagtccctggaagctcttggggtactgtttagttcatattgttgttcctcctatggggcagcaaaccctttcagcaacttaggtcctttccctagctacttcactggggaccctgtgcttagtccaaaggttgcctgagagcatccacctctgtatttgtcagtctctggcagagcctctcaggagtcatccatatcaggctcctgccagcaagaacttcttggcatccataatagtgtctgggtttggtaactgtatatggaatggatccccaggtgggcagtctctggatggcctttccttcagtctctgatccactttttgtctctgtatttcctttagatagaatcagttctggattaaaattttgagaagggtaggtggccccacccctcaaccaggggccatgcctaacctctagatatggtctctacagagaggtagagggtgggagggtctttggaggaagacaggagggggagagggaaaaaaagggggcccaggatcaggtgtaagaggagacaggggagatgtacaaagggtcaggaaattgaacagagtggtgtagcattgggggataaagaactgggggtagccaatagaaagtcccagacgccaggaaagcaagcaccttctagaacccaatggggatgacatagctgaaatacccaacaaaggggaaagagaacctaaagatgtcttttctctcctttcttttttattttctagacaatatcttatgtaccctggttggcctcaatcttcctaagtaggcaagtattgccttgcattcccaaccttcttgccttagccttctggatactagtataacaggcaagcgccattgtacctagtaccactgtatcactgaccattgcaaaatatgttctggagtcagtgtatgttcagagaggcatgcctacaaccccagagcccctagaaacctcagcagaaaacccgagctccttgtgcttcaggaatttgtgtccctggcaagactactgctcatggccctattgtccacttggtttagtagagtttgggtctatgatcccagaggatagtctttcatcataatgcccaaattagccgtaactactcagagtgacttgtgggaatgatgaatatatggctagctgcagttctctgtttctgaaagtctgactgaggagactgagagcaagagtggtacagtcattggagatgttcctagttcagtccatccacctcccgtccccctcccccctcactgttactcatttcctgtcttcttttgacgccatgcctttgaatgtttcagtgaacattacaagctggctgaaatctcttctggaagaagactgaaggacacatataacctgtcttatacataaatattttctagaatggtctgagaaagttgtaaacatattaattcatgcccttttttgactatattaatagtcaccccacccctgctgccccttatggctacccggcctgtgcctgtctcaggaccttgacatttgccattctcttagtctggattggttttctctccaagattcttttgtcttatttgtataaatcctttgtgctttccccagttatagattcttccattaggcttttggcggccaactttacataaaatttaaacactttaacatttctcttactatataaccactgataattacccgtattttgctgtgataaaacaccatgattgtcccagcccgcaggacagttgaacaggatctgaggaaccacctgtggagagaatgggggtcgggggtgagaaacacaaagaacagtcagcaagtcaagaaatcctaatcaagctgataagttttatttttcccaggcaggttttatgcccatagaagcaggatatggggaggggaatgacacagaattgctttgtttctggggaaacgcacctgttcccaaaagcaggatattgtctaggtaaaaagttcagcaggagaaacagaacagaatgggtttgtaggtacctgtccacaagatctatagctatttgttcttaactggggatagtacttttcctacagaggcctcaacttttcccacagaaatctcaactaagctagtacttttccactaaggccaagactttgtaagtaagcacttatggctgacaaggcagttaacattcaaacagggtcgctcccaacacatgaccaaggcacctttttaaaaaaacatttattttggggctcacatttccagagggttagaatccaagaccataatggcagggaaaattgtaacaggcaggcaggcatggctatggaccaatagctaaatgctcacatctcagtccaaaagcaaaaggcaaaaagaactgactggtaatgtcaagagcttctgagtcctcaaagcctatatccagtggcatgcttcctccaacaaggccacacctcctaatccttcccaagcaattacactaatggagaactaaccatttattaacctactggggccattctcattcaaaccacaatggtgacttacattagtgtcctagaagtttaccaagaagcaagatcctatatgaagcagaaggggagaaggcagggagaagaaaggcagagagaatgagaatgaaaatatagattgaaccaatgactggtccagcttgaggcccacagcacaggagggagcccatgcccaacactgcctggatgggccagagacttaggatagcaccaaacatggctgggaaaaaaatcaatgacatgattcctaattatatcctgctatacgaatagttcagttcctgccccagttgtcatcagagaggcatcatctgataatggatgggggcaaatttagagacccaaagctaaacattaggtgaagcttgtgaaaacccgtacaactgcagaagaaggagacaggggattgtgggacccagaggggttgagaataataccatgagaacttggtctacagaatcaactaggcagggctcctggagactcatagagactggagcaaaaatcacagagcctgcaggagtctgcactaggtcctttgtataatgttatggttttttagttttatgttcttgtgggactcctaacagtggatataggggtgtctctgagtgtttcacctctttttgggaccccttttctcctactgggttgcttcatctagccttgataagagggtttgtgcccactcttattgtaacttgctatgccatgttaggttgatatgctgtggatggatgctcttttctgaggggatttggaggaggagtataattaggggaaaggggatgttggggaggagaagtaggggtggagggaggggaaactgttgtggggatataatagatgatagaagaaagaaaagaagaaaaaagaaagacaggcagaaagtaagtataagccaatgagtcctaagatctgctagttggtggactagagttcctggagagttaacactgtaagcttcagtataaagatttcaaactcagagagggctggtatttcagcttgatcctgaagtcaggaaaaagccagtgtctccatttgaagggcaacaggcatggagaattttcttttactttgaaaggggtcagatatcttgttttgtttaaagcttcaactgagtgggtgagaatctgcattgtagagggagcctattcggctcagcgatggtatggtttcaaagggtaaactgatccaaaccacccaggatggactaagtatctgggtacctgaggcctcctcaagttgacacatcatgccaaccagcctgatgacatgacacactgttcattttgccttgtttggctctgtctccccacactaggcagcagtatagggagagtagtgtgtgatttgttttcctccagttattatttgtcctcagggtttaggagacctggtatgctcaacaaacatttgttaataaaaagaagcattactttcaaactctcaatataatgatgatgatgatgataaaaataatggcagttatgtccaccccatataggtcttgtgaatggcattgatcatcaatgttccaagccttccctcatttatgatgtagattcagactactgtgagtgtatttgtgctcacacatctccctatccgacattgctggtctgaggattaattgttaatcattgtaatgagtattgttactgtcattatcattttgtgctaatgcttgtggctccctgacccgtctggcttttcagtttagaaatgttatgaaattcttatagaacattaatatggatttattataattaaacatttaatttgtgcctttaggaagattaattttgagacagaagactaacaaaaataggtcaaacaaatgtttaactattgggaataattgacctcctaaataactagcactctctatagcacatgtctggagccatactgatttttaaagaccacacattcctggctccaaatccatgcccatctatgattggtttgtgactttggactgggttttttaatgtgcaatgaatgcatctctgtttccatgtaggaaaatgaatgaaataatttctatttcttaggactaaattgtgattcactgagactgaggagatggcatagttagtgaagtgcttgctgagcaggcatgaggtcctgagttcgatccccacacccacctaaaaagctgagtgtgtaaagttcttggggctttgtggctagccacttagctgaatcaggatcaggttcaatgtgagactttatctttaaaaaagaaaagtagaagatgatctagggagacacttgacatcacactttacccacaccttgtcctacatgcacatatccaaatgcatgcacacacacacacacacacacacacacacacacacacacacaccacacacacacacacatatacacacacacacacacacaccacacacacacacacacacacacacacacacacacacacacacacacacagagagagagagagagagagagagagagagaactcatatgtacaatacaaagcacaacagagctcatggcacacatgtctgggcatgaatgaactattcttgaaggctcaacagttaagagtacttgctgctcttgcagaggacctgggtttgattcctagtgcccacaccaggcagctcacaactacctataactccaccaattaattccagggcatctaatggcctcttgtggcttctgtaggcaccaaacacctatgtggtgcacatagatacatgcagctactcacatataaatataaaataatataagcatttaaagtattagtcaagagatttaacatgattaattcatatgttctcagacaagttctccaaaaagcaccccagagctcaggttttactactttccagaaccatggaaggatttccttatctgagttgcttatttgtaactagcctgtcaccattatatttcttctcatgtagttagaagtgccatattttacaaaagaaagggttattcactcattcatcagaaatatgctacagaagcaaccatatagatttcagaggaggacacatttctagcagtaccaaaagttctcaagtggtggcttgggaacagagagaggtgtctcaatatttgaacagaagcattcttctggaaataatattaggactcaagaatccagggaattagcatttgcttcttcctagtagagaaaacgttacccttgatttgatattgattgttaagaactaattgtgctgccttcctcgtccataagagagattcaaatgcagctccttacctcccctccccttcctcctcactttgcttctagtggggaggcttttggggcagagggcatggaggtggggcttggagatatgacactgtaggagactttctgtgactcagaaaacacgtgattcaggccaccctgaagcactgctcagacctgtgaatgggtttccaagcatgctttgcctacttaggacccattgcatcttcacgcaaggctatgcactctagagatccatataccaataaatatttaccaaatacttgctatagtctaggaattcttcaggctgctttgtgtctaataattatgcttaccatagtactgcggcttagcctccattattaggatctgtattggcatctgtcccctaaacaagagtaacgtggcagtatgggtcactggggccacacagcttgacagggacagagacttgcttcagactaccttcaggaagttgattcataagcactcttggcccaactaatctcacattcaccttgctgtttgcctgctacgttatccatgtagactcttggttcttaaaggggtgtcttatatttattccacattttactggtgggtgaacaaaagatgacttaggccaagaactatgctttggagtcccatgaagagtcagtcagtgggaacaacaggacttttccccatcatgtgagctttcaacctctctataacactacatcttcattggcatcctttgccctagccctccccataacctgatccaagctggcctttcacatagggatgtgaggaacttgtgacaagttgaagccttgcctctggttctcatgggctacagcaaacatggcagtaggtaccaagtggtcaaagttctggactcaaagtaatacaagacctggatagccaccatgtgaagttcctgttgccttggaaggtgatgttctatgtccatgtgacaaagagagaaagataatgagtattggaagaagtagggtatagggttgctttgggtatactgtaagtgtttagatgtaagcaatggctacaaggggtaggggtgccaagtaacaagctctcactctccaggaaatatcttaactggctttgacagcagctgtagggtccccatctactcttaccagagtcccatgaaggcaactgggtaggttttaatcactatgagcatgtaacaatgacagacataacttttgtcctataaaaccaggccataagtggggaaaatcaccctttcctatccagcaaacatcctttgctgctgtgagctatctagataagggtccttggcagctgtggctgtatagatgagggtccactgtggctgttgtgtgtataggtgagagtctgaagcccctcaagactgagcacagagctagttggagctgcttatcctctcatgtagtctactgcaaactattgcactgcaggtagaggatgaatgacaatgtccaaagctagtctatggaaaggagacagatgtggaatctgcacatggttgtccactatggctctcaggagatgaggagatgagaagatggaagcagggaatgacaggatcagggcttccatagaggaggaaatggttctggagaacccttgtagggagtcactaccctgacagaagaggggaggtgccagagaagccatgagagcccaggttccagtgaggcaggaggccactcctcccctgccttggcaggtgactcttttatttcactcttccagtatccaaagccaactaactgcccatgcagagtatttttttttttttttgcctaaaagtagtgtcaagttcatgaccattgatgatcactgtcaagctcctgtctttctttcccagctgtgtcagagcagctgctctgtagtgtgctgggtgagatcagaaatcattaccgccttcttccccaaggagcaaactgatagaagaacatgcctgcaaggggcagtgaggccctctttaggcaatataattaacctcctcacatttcagcgtgtagagcagataacactgtcaaatgctgtctaatctttctgatgttcaacatgctctaattaaaacagaaaagcctgggttgggccgagaggaacatctgagtttgtctttttgatttgcagtagaattggtcatttccttggtctccatcctgagccatgtaggaacaatgagtgtctgctgtgagcacatagtaggtaggttgagaacacacagtgggtacccacgtggcggcaaagccacatggtaggaaagctgagcagcatgccactgtgtttcacacacactctctcccaagccagtctggggatttcctgatagagcaggacaggaaaacaaaatacagccatgctaccatttggtgtgttctttgtgcttgcctggagccttcagagaataagaaataccagcaaactagtcagggtgttcctgggctgagtttctagaactgcacattcctctttgaaaagcaactgaattctttcctttttttttttttttgtctccagtagccacttgggatttttataaacaaacagaaggcagagagaaaagtattttacttcaccaaggatatgttgaaaatgacatctgagctatttctagaactattctgtatttaagtggttggtgttttctcatatgtctctccacctttctcctaaagatggctgttttccagggatcctggcttccatgcatacacttgcttcctggtgacagtgtcagccctcagctctaaaggcctttcactgacttttctctgaagctccttgctctactaaaacacatttctgggttgttgggcttttttttttttctgagaattcccaatttcctattgactctaagttaaaattcatattgttttcagagtaagcatagcatgctgtctctggccctgaaattatttctgagaagttcccccacccccactagaatatgagcttgctggagtcagaaaccacatctgtttgtttatctgagtcttctgagggtctatgatgacagagggaatggaaacactgcatacattcccacaggtgattattttagagtattgacaaaatgaactcacagcatagacactgtcacccccacctcagtctctctgttcatcatcttgtcacttcatagcccactcttcatccagggcctccactggggtttcttttcagagctggggtttctcacaagtgcactttaggaccccttgcttcctccagggaagtactaatcccattggttcctgctttgccttcaattttctcattggatccacatgggtatttccttttcccataggcccattgagcaactgagtctgagtttgagataacccaaaattatatctcaagacaaaggagaaataaacatggtacataaattcatccagtgctcagtttattgcctgtgatactactttggagtagacttttccatatgagggtatataatgatgacaagtctctaatgctcagcaatatattgtattcagttacagtagccaacagttctgaatctgacttgtctggttgagtagatttcttggtgggtaggtcctgtagaaattgtttaataccaaactggggtttctaccccaccttagacaatttatttcctagaaaagacacacacacacacacacacacacacacacacacacacacacagtcacaccttttatatttatagcaagcctcaaatagcacaagagcttggctctatgttgttagaatctatttccatattgataaccttgagttaatactgtgtttcatctgggctgctcctaactccaattggccagctctcggggtcatattttctttactcctaattatggtagcttctctgtcctccccctgccttttttcttttccttgtggttttccagtcccaagcccatgaaacctaaatcccacctatgtctcttctgcctagctattggcggttggcatctttatttaccaatcagaaataacttggggctagggtcacttagcatctatgtgcagactctcttatctcttgagggcccaatattagcactagaatgtaagcagcaccatgccaaaccactataggtaggactttagttctcctatcctgaggcataaccagttagaatatctctttagcagatgaaagtcaagtcgagttgagtatttgctgctgtatgaatctcagctgcctatttcattagaatataatttttatgaagacagatgttgagaatgtcaaagacataaaataagacagcaatatgatataggtccttaggccttgctgtacattagaaccacctgggagtccttaaaagtcccagtgcctaggtcccaccccattccttaaatcatacattggtgggtgacagccaacatcagtaaactataaagacttccagagagcttcaaatttcagcagaactggaacccatcttgacaagaattatgacgtcctattccaggagtgaatgaatttgcctaatggccaagtcaattttcacaagatttctgcatcataggagaaaagaggacatagggaaagaagaaaccttcttagcctttaaaaatatgtccttagacctactgctggtttgagagtgtaccaccatcttcatggtctagaggttgtttattaaggccagggtcaacattgattggactgataagaaggttctatggctgtgaagagataccatggccatggcaactcttagaagggaaagcatttaattgtggcttgcatacagttcagaagtttagtctgttgacatcatggcaggaagcatggtagcacgtggacagacatggtgctagagatgtagcttgagagttcttcagctatatctacagaggtcaggaagagagagcatcaccaggcctagcttcagcttttgaaaccaaaaccaaagtctacccctagtaacaaattgacttcagcaaggccacacctccaaattcttgtcaagtagtgcaaccccctaatgaccacacattaaatatatgaatcctgtttaaccccccttgttgtccatatgtgctcatatgtgggagtgaagaagtagagatggaggtggaactcaggcttctaccagcttcttcatagtataggggaatggtaaattgttgataatagtccattatcttatctcctggtttattaggagatgttcaaccacaatcagtacttaaaaggtagctgtagtcttaccatagactacctttctcatctctctgccccttaactcttggttaatgaataggccacacaagggcaggtgtggtcaggctttaatggtgtattggagatagagggttttaccaaagcataagcaccaattcctctcctgtctcaccatatgcagagagagcaactgaccttgcaggccaccctcctctgacaggactatggcacaatatacttgactgttttcttaatcatattctcccttcatggataccagacaaaattattcttaaactgtatcatgttaaaattatctttctaatgtgagattgtttattttctgtgttttcatgtgtgtagttaacctctctggtttgtatttttctttctagcatcttctgtaggcctagaattgtaggtagatattgtttaaatttgactttattgtgaaatatcttttcttcatttatggcaattaaaagttttgctgggtagagtagtctgggctggcatttgtgctcccttagagtctgccacacatctgttcaagacctacaggatcttggagcctccattgagaagtcaggttctaattctaataggtctgcctttatatttcccttggtctttttcccttgctgtttttaatattatttgttctatatggttttttttattattatgtggcaagggaattttcttttctgttctgtatgcttcctaggaatttccttctttatgttagtaaaattttttctatgattttgttcaaaatattttctgggcctttgagctggtattcttcatatccctctatttctgttattcatgtgattcatatgttaggtcttttcatagtgtcccagatttcctagatttctgagttaggatttaaaaaaatatttaacattttctttgaccaatgtatccatttttttctcttatagcttcaatgcctgggtctctctcttctatctcttgtattctgttggtgaagtatctttttgcagttcctgtttacattcttaaaatgttcatttccaggattccctcagtttaagttttctttattgcttccatgtccattttcaggtcttgaacagttttatttcttacttctattgtttatttcttcttgggtttctttgaggattttttttttttcatttctgtcaattgtttgtgtttccctggatttctttagggaatttattcatctcttcagccaggaccctagtcatcctcatatagttgattttaaggtcttttacttgtgcttttcctatgttggaatattcagatctgctatggtaggacagcagtgccctagtgtagacatattgctctatctgttactgactgtgttcttatgctagtatgtaggcatctgagtttggtgagatgacagttctaagtgctgatttctgggttaatcttatttgggtggttgcttttttccttcctttccatttcctctagattctctgagagtgttttggctgagtgttgcttcatttactgattttctcaaagaggctggtgtgttaatggggggtttcttactggtgttagagggttggggaagggaaggctgaggggagatattctgaggaatccacaggaagagtgaacagatgggagaggaagctgctcctggtgttctgttgaagtgttaagaggtgaccctgaaattgggtctgggaaaatagggagagtgtgggaggtttgtaagcagcctacctgaggttcttgtagtcattgcctgtggttgagcagggaatgtccaccacccaggttggtgctgggacatagtgatgaggtgggaagggaatgaaaacaggagatggtctgatcttcaagtagccttggcctgtgattgagcagtgagtatcctcccaagtaggagtctgtgatacagctatgagttaagaaggcaaaggcagcaggacatgcatacaaggaatgcacagggaggaggggaagctacagctagtgttctattgcagctctaggggtgaccttcagaattgagtttgagataacacagagtggagaaagtctatgtacagccaacttggtcatctcagtgaagtcaaaagaaggaaaatacacacacacacacacacacacacacacacacacacaccccacaaccaccaccaccaccattaccaccaccaaaataataggacttaacaatcattggacattgatatttctcaatatcaatggcctcaattccccaataaaaagacacagattatcagtatgaatagaataactggacccatcctttttctgcatacagaaaacacatttcaatatcaaggatagatattaccccaggataaagtgttggaaaagatattccaagcaaatggacctaagaagcaagctagtatagccacttttatatctaacaaaatagacttcaaactaaaattaatcaaaaggtacactacatattcatcaaagtaaaaatccactaaaatgatattttaattcttaacatttacgccttatatacaatggctacccatatttgtaaaataaaccctactagagtgtgaatcacacattggctctcacattatagtgggagacttcaataccctactctcatcaatggataagtcatcccgaaaataactaaacacagaaattctggatcttactgacattacaaaccaaatggacctaacagatattcatagaaaattccacccaaacataaaagaatataactcttcctggtacctcacacaactttctccaaaacttgaccatatattcagatacaaagcaagtctcaatagatacaagagaattaaaataacttcttacatcctattagaccaccatgaattaaagctggatttcaacaacagaaagcttatagactcatggaaactgaacatttctctagtcaatgaatagtggatcaaggcaaaaaataatgaaattaaagactttctataattcaatgaaaggagtacacaacacacccaaacttgtaggacacaaagacagtggtgctgagagtaaaatccatagcactgagtgcccacagaaccaattggaaagatctcatactagcaatttaatagcataactgaaagctctagaacaaaaagaagtaaacacatccaagaggagtagagagcaagaaattatcaaattgagaactgaaatagaaacaaagagaccaatacagaaaattgacaaagagttggttctttgagaaaatcgtcaagatagacaaactatatccaaactaactaaaagacagagaatatccaaattgacaaaatcagaaacaaaagaatggggacataacaatagacactgaggaaattcagagaatcacaagaacatactttaaaaacctgtactccatcaaattggaaaatctaaaggaaatgggtaattttctccatagacaccccttaccaaagttaagtcaagatcaggtaagcaatttaagcagacctatatcacctaatgaaatagaagctgttattacatgtctctcaaacaaccaataaataaacaaacaaataaacaccaaaacccacaaatgaaatcaacaaacaaaaagcaagactaggtggttttagttcagaattctaccagacttttaaagaagagttaatgacaatgctccacaaattatcccacaagatagaaacagaaaaagcattggccaattcattttatgaggttaaagttatgctgataaccaaaccatgtggagacttaacaaagagaattgcagaccaatttcccctttgtacatagatgaaaaaatacacaacagaatactacagagtgagttccaggacagccagggatgttaacacagagacctcccttctcaaaaacaaaacagagtaaaagaaaacaaacaaacaaacaaacaaacaaaaaacccttgcaaactgaatccaaaaacaaataaaaaaattcatccctatgatcatgtaggcttcatcccagagatacaaggatagctcaacgtaagaaggggaattactgaggaaattcaagtatatagagaggtgagggatagggataggaagtgttggcgggagactcaactgaagtgaaggaagcatgaaagagtcacattgaaacctatggccattcaactcaagaaaagctttcaactaggcagcataacacaggtgacatgaaaagtggctgcaccaggtttagagtttagtgaagatatgggtttgggggtaactgaaggttagccaaaagtaaggacacataaagaagtcttctgggtgttcaatagtccataagctaagtaaatacactctttcatgcatatacattaaaataataaatacataaagcaataactaaattttacacacacacacatacacatacacacacacatttagttttatcttgatgtatttaaatctttggccctttggaacttgccctactggactgtgcgcactacttaaagagtgggtctcagttaatatttctagatatcgttacccagtttttgcaacaccttttgtaagatatttcatattctaaatatggtcttagggtttgcctacagaagaaaaaaaatcctcaactccttttgtcttagtggattttagtttgaagtttcctatgaaagtgctgtatctttctgcttccgtttgtggttcctgttctgttttgtgtcaccatgaatctcttaagctgtttatcaagcattttgtgttctggctgcctgaccaacaggattcttgtctaacaagtcaaggctcaattacctgaaatgcctttgtggtcaagtcctctaagcagcagctccccatcatttgtaagcagggaactcgctatgaatcctcagactttgctaaattctgcgcagtggttctcctccaggttaaggatgagcaatgatggaatgaaatataaaattatggctacatttgagatgggaagctttgagatggagtcttaggatttctattactgcaaagaaaaaccatgaccaaaaagcagatttggaaggaaagggttgacttggcttacacttccatattgttcatcattgaaggaagtcaggacaggaactcaaaggtagagacctagaggcaggagcagatgcagaggccatggaggggtgtcccttattgacttgtttccaatggccttttcagccccctttcttgtaaaacctaggactagtggcttagggatattaccacacatgataggctgagcccttccccatagatcactaattgagaaaatgccctacaaccagatcttatggagctatttcctcagctgtggctccttcctttctgatggctctagcttatgtcaagtggacacacaaaggcagccagtacagggaagaggtcagttgtcaacctatagagatttacagaataaatgcctctcatttccctaaaattccaatttgttgcttccattcctcccacataagtgttgctggatgtagcaataatgcaatgctacataaggctttgtggaactgctgatcaattttcagcctgcagtaccagagcacaactacatactctagcacaactacaaactccagcaaaaggaaaaggatgtgggacttcagggttctgttcacctatttccacatctctttatgaagtttattttctgatcatatagtaagcatgcttgttgaacactgtgtgtccgtgtttctttctctgtgtgcctgtgttttcagttgaccatggagggcagaggcattgaggatcccctagaaatggaattgaaggcagtcatgatataactgatgtgggtttgagaacttaactgaaggtctctgccatctcaatgcatgctcttgaccaatgaagattctcttcatcctttttctgtgtttttaaatgaatttgactcgccaaaccatttgagttaattaatgaaattgaaaaaaggattagaagaaaaaagtggtggaattcctcaataatgatgaaaggcaggggattaataaagaaaagctggtatgggagatggtgtgggaggaacatagactcagataaatgaaaatgttatgcattcgtgtcattgctacattgctcacaaagctacctgtacacttcctagcaggtaaaataaaaacacagagattgccaatcacttttgccataagagaaatagctacgcatgaggaggccagtttttttttttttttttttttttgatgctgagctctggatcactgccctgttaaagaacaaaattctcattatgaagaaatttttggtctcactgtaatttggcagtcacgtatgtggatttgattacaggaagcggggagggggggagggggagtagacagacatatcctcaccatatggatgaaaaaaaaaaccctctttctaactggcctggcaagcaaaagagatgcaacttttgagacacagaaaatatgcaatttcagaagttgtgaaaccaagaacatgaaatcaagtatgaaaatgaatattttgggcggagcaaatcatcatgctaatcattcaaatgggaagatggtgtggttcaataggcagtgtgcttatgttgatcttgcatgggtgctttctctggttcgaacctagtgccacaataaaagcctttaatacaccatgacaaactggtataataaaaccacacacacacacacacagctgtgtggacagttctatgtatatttaccccctaactctttttattttggctactctttgattctccctttccttgatgacctttggaatttaattgttctacagagagagtaggaagatatttaaatctctcccctggcatggcagactgaaaattgcttagcagttccaaaaagtcttatttagcgtctcatcattgctagtatcttgttggtttaagattattgtaaaatttggaaaatttctcccaagttgctttcacacttgatcttagccaaaaggacaagaagtgattcccaagttactttcatacatgagatggatgattcgaccctgcctcatggctaatatggtgatctcatgcctggagctccattacacctctgagcccttccagtgttagtgtttacgtgcatgccatgaccagccatgatgcttcatcacctgtaccactttatggaatgagtcaggtgaatcaggaggagagtactaaaaataatttctagacttctactaaggaacagccaggattaagtacatgttactgatgggactttagatcatgtacattccgttaaatcgacaccaaacatatctcaaccctagcttcctatgtcttcaaatagcttctgtagttctcctttgagaaacctggctaaaggtaagtcacctagaatatgagtcttcatcaacttcaaaagaatattttataaatttcttagaggcaaaagtataatagagctcattagccagaccttccctagctattggcagttttagagcaacagaaggaaccttgaagacaagtcttatcctttagtaccatcaccctgtgtcttagtcagggtttctattcctacacaaacatcatgatcaagaagcaaattggggaggaaagggtttattcagcttacacttccatactgctgttcatcaccaaaggaagtcaggactagaactcaagcatgtcagaaagcaggagctgatgcagaggccatgaagggatgttctttactggcttgcttcccctggcttgctcagcctgctctcttatagaaccaagactaccagcccagagatggtcccacccacaaggggcctttccctcttgatcactaattgagaaaatgccttacagttggatctcatggaggcatttcctcaactgacgctcctttctctgtgttaactccagctgtgtcaagttgacacaaaactagccaacacaccctgtgagatgatccatttaggaacaatcaagagcactttccaggccattgaacagggagttgtttgcagttggtgggaccatctttctatgtgatcatggactagtcattcaactcctctgatctgagttgtatccctttgaatgttgaggtattaataatacaagggaaaatgacactttgaatactaagtgaaagatatatctgttgctcttttgaatatcttacattctaataaacacaagatttgaaaaataaaggtctacaaaagggcaacagcaaaatatgaaaacaagacatccctaacacttgtcctaccctcaaaggacaattttcactgcatgtatgctgtgtatttgacatattggatttaaaaactgtacgtcgctggcttgttttctcttgatgtttctcgtgtgtggtgtctaatgtgcaggtgcaggcttctagcaagacagatagcagctgtaaagctcctgctttggtgagagtggaacagaatcccttgcttagcactgaagatggtgaacttgaggccacaggttactaacatagagtcaggaagaaagtccaggtgcatgctatacatgatgacagatagacacctgtttaactgtcatttcctgggtttctatgggaccccagtatcaactggaaaagtcccgatggctgaacttctcaactccaagaaagctgactcttgaggggatcccgacccaccactgatcttggacttgctctctcctcatagcactcactgaggactcacaagtcttgccaaaaagtgcaatttagggccatatgaaggccctgggttatttctagggtctgtagtagattgacttgtttggtttagcaatgcatctactaaactacactcaccagggggaactctgttctttaagaaatttacaccaatcactttgcagctggagcttgagggaagaacaaaactggacttaggttgcttagtgttttatcttctttaagagagttggggagataaacttgcagttgggagggcagagaggttaggaggatctggaagaagtgggggagggaaatatgatcaaaatatatggaaaattttacataaaaataaaaagaaacaaaaaaagcaaggcttgccttgagcctagaaaggtcttaattaagcattgtggtcaattcctgactcatcccatcgaatgagtcaccatttcagcacctcatcatcttgttttgaagctaactgcattcccatgggcagaaaacatatttatttaacttttattaaaaactaatggggaagcctccagcagtctccagaggtgtcctattctgtggcctcccctgtaatttatgcattatttaatcatcagatgtattctttcagagagcaggctggattttcctcatttaccactcactcccccatgcagagataaaattattccctgagtatcctggatcacggattggtaccttttggaaatgagaagataatgctgtttatgtatgagtgcaagagaactacttttactcatctgtagttaacagggattaaagttgaaatgtcagcgctgatattaccttttctaaatgctatccatattcaaatctacccaaatactgaagattctaactgatgtagaggatgtttaaaatgggggaggatctaagtcaccaaacaaaagccttctggtgagtattgtaaaccaaaggagtgagataagctgtgtagtgaagtacaagggaaaaatggtgtttaactcaagtatacagggagtttggtgagggttaggggaaaccccatacccttctctttcacaattttaccaaggtttaccattggcactacttcttactcataagagaaaatggtgctagaaactgtggactgagtgagtatcccttggcagttgggtggctatgcctttttttctagaaggcagaaaacaacagtacaaatgcaaagagaggctagagcatgcctgagagctgaacggtggctagtggctaaagatcacctacaatggagaccagattcaagcctcttcttctgaaacactcttcctctggccacaggcagtccttgcctgtttgctagtcacccaactttcctctgtagatgttctgtgccctgctatgggtttttattttgcagaaaaggattgagattaatcccacagactcttttaaatctgggtcctcccacctgtgaggcagattaaccttgggatttctccaaagtcttctacattaaggagggaagacatgcccatgccccacgactaatctgcttcgtctgtgagatcgtgtgcatcacatttgttgcaagtcacctggcttacagcaggttctgtctttccccatctaccaaagtgatggctacatattcacacaccaagactgtggttcatatcccatccatattgtatttcttctggcatggtttttccagggcatctttcaagtcaacaaaaagggattaaataatccatttcccttccatgtgacatacatacatacatatatatagtctagggctatggagacaacttaatagctggttgaggcatagtacctgcattggtgccaatcagggagtaacatgtgtgttctagttctaaaatggaatgcctgtgacagccctgcctgtatctgtggacaggtacacatcaccctaggggattctaattcttctggattttaccagcaaatgactgtaacaaagaagggatatattaaagtatgcattagggatcctggttattataaattacattctttgaagtctcatttagatccaggaaccagactgcatctggaaggctctgaggattaatcctttcagaataatagagtgtcagtgatcatttggaaaagtaattataccaaatttaattatcatgtgcgtgtttcattggcattgctgtgcatacccagggtacagcaggggatggactatcccagcacgagttctggattgaggattgtggcgtaaaactctacatgatgtaattaaataccacttgcatagggggcttgatgaagacagaaatcatgtgtggggtctgtgggagggacccattccccacttagtagatatttgaggtatttggaaagactcttaaatatttttattatattagatagggaaaaaaactacattttgtgtaagctgataaataatgtttacacttgttctctgtgcttgtagcatcctgacttcttttaagttgaagactattcaagtggagggaggtactcaacaggactttggtgccatgagggagagcaggggtaccacaggacctgtttgatggacacatggactctggcagtgtggactccagtgttttcagagcttgccctattggatgatgaccccttggagattcatgcctctatttttttttcctatctagtgactctccattggctgtctcatacctctcagaaatcactcctttctagggggcttctcctgatgaccctgttgggatggctgccctgcacttatttgcagagcacagtagtgtaattgcttctgtatagaccttttccctctgtgcatttttatactgagacagctctgacccttccctggctcagtatcagcctagcatcagctcccaagtcccaagcatagcacctgcattgaaaatgctctgtaaatatttgttagaatggatgattaaaacctggaaagtgcaggagttggtttctcctttccacacatccctgtttttgctgaagcccaaacaagcagtcttcaaagctgctgtctttggtttgggctttatctggagataagaccattatgtttgaagcaggcatcttccacttgatctgtggccaggagctaactcggaacctctctggggctcagtgaggattgtaaaactgacagaaagcatcaggagatgacaagctcaggtagtgtgtggctgacatttgcaggtagcaggtattctccttttcctgtcatgcctgggaattgctttttgtttatatgcctgaacctattctttatattcctgaattgatgtgtaagagtctgtcaaggacacacaagcttaaactgttcatataaagtcacaagtacacttaggttaatcaaggattcgaggttgaagcctcatctgagagttgggaggggttagtggactgtccatgttgaagaaatgcttctgctttctagctgagaatcttgttccttctggtagaataggatggccctgctggggttcagtacccatgatatgtagctttctgttgcagggtcttttgccaacaactaaatccttcatatcactgtatgcaaacataagggttgcatgatgagagatctattgccacataggggaatctgtaagtacctcctatgtcatgacacagagatcttagggactattaagcaataaatcaggggaagctgtgctttgagaacacataggatgcattttaccagctattgaagtcaggttgactgccctcaactcccttttcaagacaaaggcaggtttaatgataaatggtttcaggatctcaaaggaccttcattgactcttgcttatttattgggcagcaactgaatggggcataccccaaatgggtacattacaaaagtggccttgaagccaaagatgtaatcacatctactcaattaaatttttatcaaaaattggaaatagcatgagaagtaggtgtccatttacaggtgagttgcccaagtcattctggtaataacaacatagtaacatttaaattcattgagcatgacaaaatacctacccaggtaactttgccatttatgtaggtaaaaaaccatggagttctttccatggatttcatttgtggataattgaacactttggctccaagttttagataacaatgccaccttcaaaagatgtaaaatagaatatactaaaaatgatgttaggatgctgttttatatatttataataatatcaattaaagggtattattcctaagggctcaactaagaaggcttagtcaagaggacttgaaagttagtgggatggagcagtgtgctttggggactccttatattaatgccttacctggcatagcagggtaccctcggaggcagaaattccttttgctctatgaggtttaaaatgtcatcactaagtatgtaagattgcaagtgagagtgctcctataccaggcccggggtttaactttatagacacaaaattgaaggaagaaatacattttccaaacacattttaaaaatagtttcccttggaaattaaaaccattaaatgtacatcattacgcagatcagtattcatgctttaaagaaacaattttgccttcatttaatttgtttctctaagacctaattatggattgggtaaaaaaaaatgttatttttctatcaccctgcaaatctccttttatcacccagaagggcacttcgttctggttagaaagggttgtttctgagaagttcttaagaaaggaagtcagggggaggttttcccggaggaggttggttgttcattgagaaaaaagaacatgactggatgtgttccagtaatgtggacgtgagagaggcggtaaaggtgggattcaggccttttcttgagcagttaagctccgtatccagggcccagtatgctgctaggaaatcccacagtgagcagagtgcctgaggcctatcaccatgctgtcatgcagagacctctaaggacaagcactcaggtccttgactggtgtccatgagtgaaagtggaagacagtcttgggaagtagcttgatccatggccgatactcagccactgttggagttggctctgaatgggctatagaatagcaactctgccatgtttatcatgtgtttggcatgatcaccagtattttataaatgtcagcttatttaatcctcataagaattccatgaggcaaatgatattcttatctcaaaaatgacaagggatttgagcctaagtgagaggtggaaatggatcagctggcaggagtctttaataattcggttgtattactactggtgagtcacttacaacttgcaggggctatatatgcatggatacctttgttcctattaacatctctttgaggaatgcaagactctgactagctcttattttggtagtacctgcagagttgtgtatcttagcatgtgcctgcctatagaatccataccctttgaacatgggctggcctgcaactttgctttaattgttgtaatgtgacagaaaagggcctcaaaccttcagatcacttttcccagtggggaagaaatgacatttgtcatattaaatgtctgagtacccttaaagctctgtgctcagaatagagctatgagggggaaactaaagccccagatgaacgcccagtgcaatgtcccaccaacttacaagccttgtgaattaagtcatcgtgggaggaaattgtctaaccataatgtcatccttggctggtaccacacagagtagagatgagcttttggctaatgttgcccaactgcaaataaagtaaaacttaaaaaaaaagtttgtcttatttgataacatagcaaaaggtgcttgaatcaattcttgcctctaaagatgtaaattgtgtataaagaagtcttggatgtgttcaaagtgacatagctaagaagtgagagatgcacaaattgactcaaggagaggaggatacttccccagctcactgcaatcatgtgtcccttccattggtgcatctgtgagaatttgcttagtgctcaatgactgtgtgaggctgctctgtgagtgctctgatatgggcattctgggctcttgctactcagcctttgtcactgacccctgtctactcaagcctttctgttgtggttggaacttacactgccttcatagaatagttccttatgtagaaaaacactgctgagagagctgacttgtcagaatagcagaactttttaagttaggtatattaagggtcacagacgatagggaagattatcccaactctgtgacgtggagatgtgagtaacttgctcagagtcaccaagcatatttggctgtgtttatctcgcacataatatggttcaatactaaagtttgtgtctgctctttgctaccgcacccccatgctgcaggctctatcatagtatttgagtacttcctgaattctgttcaaattgagccttctgccctctttctttcaacaacaagcaccatcctaagaatgctttgatcacttgtaagataacaaaaatttggtagccttttattaccactgctgattagggatggttgtgtttatttttctgtacaagccctcacagtggacatgtggggggatttgacaccagtcttactcagcatttggaggctcttcacagaacagcaaaatttgtgccaaatgacatcttacattctagaagttgcctccaatatactacaagaattccctttgcatacacagcacaggatgaagtattctaaatgaggtagcacctattcctaaggaagagagcacaaaacaaagctagtaacattgaggccatacacaaggacattggaggagagcaactaaataactgagtcttgggtccctgactttccatccttttgagctggtctgtttctcttgtcttagatcctgtagttagctcagggacatcctagcagctagctttgtggagaggctgcacatcaatagccaacatatgcacatattataataaaaatccacagaccaacaattctctatcctgatccttgcttgtctccttatggtagaaggagtcagtaacagtgcctacctcatattgtcaggactagagacatacatttgtgaagagtgcagcccctgacatctcccatatagctatatgttggataaactggtaaagaaggtacaaaaagctcaatatatgagatgcactgagacatggtagatgtctcttcatgttatattgagcaagaaatgagaaagagaaaatgtggatagagtgagagacaaacatagctagggaaagttttggattatttctaagagtctccagtgcatggcagggtctcactgtccttgaatctgtgacaagggctgtcagacatcagagttccacctctacatgttgggaatgtgataagtgaagccccggaaacagagtggtctgtgtaattcataaaccgagtttcttcctatgtttctgactggcatgtgggatccttgggcatgttggatgtcaccaccaaaccacctgcgattctgagtcttcttgagtttctaggctcccagtagaggtgccagaagcctgtgaagtgagaatggcctcctctgcttctatctcctcttctatcatacatgagactcactgatggcagcagccttctccctatatcagtaggcaggcccatgtggcaaggtggttgtcctgctggctccaaacacctccaagagaggtgtttgctttactctgaaaatgtgtgctatcccccaactcccttaaaccaacagtgcactgtagccatggggttgtagaaacatataagccttagagggctgcttaagtgttcccactaatccaccgaactatgagacattaagatatagcattttaggtgttacgttttttaaactgattctttcaaagtttaatatatattgctgggatctcttgaaaataacagctttgttatgtcctgaagataatagcttatacagtcctttcccatactctggctgttggatcctcttcacctcctctttcattaaattccctgagtcttgaaggggatgatagaaataccctccttaagaatgaacacttgggacatactcagttttgtggcttggacaagttgtgagtctctgcattcagtgcacactgcagatagaagcttctgtgatcaaggctgagagcactgctagtcgatatgcacaagcagacatatttcgaaagaaggcagcttgagaacatgatcatttagcaaaaacaatggcaggttcaaaaaaccactaattcttttttgaaacattttcctgggacctacattgaccccaaagtctggagtcctaagcccctttctacctgccactctattagtatatgaatgagccatcaaaaccataacaacagcaataatagaaagagaagctatgacagaggctggaagctcctagactctggattaggttgcttccctgtcagaaggactagaccgattcagaagcatcacacgttctttgagaaaaagagcaattgtaaaactaaacgaagtgccagcaatctgccagttgtatagacagagtcctctgtcctctcagtagcactgtatggcatgcagacattaacctcataatcatctcaggggaaacagaacaaaggaagctgagttatttgcttaagcaatttcgtgcagtctatacaggcaggcaccatcatttgaaccaaagtttgcttctctctcccacatgatggaacatgatggaaatgggcagggagttgatggacgggaggtccattcatttccattgctttgtatgtgttattccaacagcaatggccttcatatcagcctctccttgggaaaatcctacagtctctctttaactttataatcacatttcattattattaatttttcttttggttttgtctttctccaatcttaggctcccaagataacatccttccctgcccccaaagtattctataagcgttcttcttcccatgattttaattgcattcttccattcaacctctctcccttccagcccataaattctccaggacagggattatgtcccattcatctttgtgacctgagcctgtcagatctggcaggtggtagatgctaataaagacttgcttaattaatggctattttgatgatttagtagaaggaatagctctgtgagccattggttggatttggaaaataatctctctgtggaagcctccaccacctgtggatcctctgaagagtcaggctagtgttatgtggacttttgcttcctatagtgacttcactgtgtcactgctcccaagagggagacgtcccattaccagataacaaaggataacattggaatacttagctacacctttcccttcaaacttgatcaaaagattaagctttacagtattactgtatgaattgatacttatgcttgtagagaaagagttccaccatgatgcactgaccaccatgataccctgataaccatgagtgcattcaaggtagccaccaagatttaaatgaaaaatactacccaccctcattagttaatgtatttgaacacttggttcctagctagcagtgtggtttgggtaggttataaaccctttaggaggtacaggcttgctgtagaaagtacttcactgggggtaggctttgagactatatagccttaccaaacttccttttcattctctctactatgatcagccagctttctgattctgctggcatgctctatcttccccatcactacagactctacttctcttgaactgagccaagcaactcttccttggagtgcttcttggtcatgatggtctcagcaactaaagggtgactgatgcagtcactcgggctgagattgaaactggggctgatggaagtgtaacaccatgccatcttcctagagcatggtgggaaggaggctaggagctgctatgaggctgtctcccaatctctctgctcctactcattttatgcttacagtttcaagcctacctgggaagctagcttgagaagttttttgatgtctcttaggttctaatggggtatgtggctgcagagtataaaccatcaagctaaagtctagggtaatttatggagaacaagtaagtttttgaattattgttacctgggccctgttgcctcattgccaggaagttggcacatttggttgtttgatattttctcttctatgtatgtagtacatggaaatgaaatgtgcctttcatccttccagtgagtctccaggccttggctctgccctgccctgccatgtgctgtatattcccctcactggacttctgtgcatgttctatatatcagtgtttctcagtatatgccaggaagactgcttcctttcatttgccatctgcagccaaagctatattctcctgaattataagatgattttctaaaacaataaaataaaaactaaaatatgcaaatacaagttcctctctctttccgttaaagaagctcataaaattctgggtatttataagcacccacattagatccctctgctagctcctgaaggccaggaagcacagtgagagctgtccccagctacagagtttatgtgctctcagctgtactgcaaagcagagtgtggttggtcccccaagggacaatagtgatttcagaataaatggatttgcaaagaaccttgagcttttttatttgattctaataaataatagtatattataatttcatgcttgtgtgataaagggtttatggataatatcaagttttaactaaaatcactcttggtagaataagtgggaagctttatagctatcagataacaattggtagacagaagacaaatacagctttcagtataaaatggcttcagacgcgcctaggtcttaacctggacatcttgtaatgctcaagtcatactgtttaccttaaattgtggagaaaaacactgcaatcatgttctgatattatagagagatagttacaaatttcatgttaaaatataaatgtttaaaatatcaaactagaactagtttaattaattagacagtacttagctttaagtatatattggatcttgaatagtcactaacaacagtgtgacctatcagatctagcaagacaattcatgataatatatttcaccagtgtttctacttgtaaaactgatattaaatacaggtacattgtaacttatacacttaactatttgtttaggtatatatcattcacaaataagctgtactatatgagattttatattctttcagagagtagtgttagattatccactgataatgtgaagccatctccaaggacttgcggtctttgaaatgtttagtcacttttcaactttcatctgacaggcagaggccagaattttaggaccttctctagttgggatgcaagttcagtggtgctcctgagacatgactcccaccaactctaactcataaagggactacgggctgccagtgtgtgtgctttggtcttgcactaattacagagatcataaagatacactcagggggcacatcggctctttccacagtttatctattgcaagcttcattaaagaatgtgtattaaagaaaagccatttggggaagaccgatgtggtgctgtcctgacttgtcagggtaggctgcctaacatcagtatggagatgacactctgagcaagtccaccctcctggttgcataatggaataaggagtggcttgaaaattgtgctttagtttttctcattataaaaacaagtcaagctcactgtacagtgttttgaacatactgattttgaaaatatatattaatcatttattacaataactggggctggagagatggcttggtttgtaagatgcctgctgggcaggatgaggtcatgggttctgatctccaggactcatgtaaaaaagtgagatgtggttatctctgcaaccatgctctgatggggaaggcagagacaggtagagacttggaactcaatgactatctagtctagccattggtgagctctaggctctgtgaagaaatgctgttttaagtcacaagcagaatgggcaagatgactcagcacgtaaaatcacttgccagtataagccaaatgacctaagtttaattaatgaaacacagtggaagaagagaaccgactccccaaatttgtcctcatatgcacatatactatgaaatgcacatgcctgctgtcatgcacatacatcatacacacaaacctaaacaaaacatggtggagaagaatagaggaagacacccagcaatggcccctggtctctacatgcactggcacaaacatgcaaaccctcacacaaacccacaaaaatgcactcacacatacatgcccacacacacactgaaaaatatcattaagattgggcatgtagaaagatcatagagtatttaccaggtatgtgcaggaatctgagtttaatccaaccctggagagagagatggggccagagcagccctttattagcttagtaacttgagatctgtctatattatttatctttcatatattcccatacatcatatacatgtatatgtgtgtacatatatatgtgtgtgtatatgtatatatgtgtatgtctatgtgtgtatgtctgtgtgtgactatgtatgtgtgcctatgcatatgtatattctttattccctaccaaaaagccactaaaaaatctttggccatagggtattttcttctatgttgccaaaggcatcagaccacataaatgaaaccacacacacacagatgtgacagttactgtctcaatgggcatgacagcagctctgctgttccccaggttgcagtggctgtctattcttattttgaatgctatcttctacatgttacatgtatcccctgcacaatccactcctaaacatttccccagacccaccattaagcactgttaggagaaacctgaatctattctaaaatctgcttgcttcacatgcaagggacttatctaatttatagtgtcactgctaagagaaggaagctgtaaacagggcagccaggagctgtgatagacagtccagactctgcaaggcttcctgctctatttaattgtattcttacaagatcttggctcttttctcaagattgcaagaatgtaaacacccagaacacccacccatttgtctcaggttcttttagttcctatcctcccttaccctcattccaccagcacatctggttttaccaactaaacatttctccaataatcacaagattccctttctcatcaccacatgacatttgggatcatggcattttctcctgctgatactgatgaacactgataatgacaacatgactaataggcatccctgataatggtgattatctcttaataatcatttcatttttgagacaagactcttgctttgtagcccagggcagcctcatataaactgccttcctgtcttagctgccaagtacaggtattactgatgctctgacaatcacccttttggttgttaatgttacatccagggggctgatcctaatttcttacctcttctcacacaattggattattggatttttggtagtttcttttcttttttgctcgctatatatatatatatatttccctgatgatcatcattgtgcatagcttttgtatttgatattcatatatggaaattttcagtagaaaaatcactagaattgacattccatgtcaagggatgtatttcttgtgctttggttgcatagtgctgtttccccagtagaggaagtttgcccactaatccaattgtagtaagatcactatatcaccactacatagtacatttcaaaacagttttgtaagcttgaaactagcttaagtgctttgttaggttgaatgcatttttatgtttggcagatagatagttactgttttcttctaagtatttattctggtgtcctttctttttagtagttccttatgtcttttgttacaaggtattttctctaaagtccagggtacaggccctccctgttcttgtaagaacaaaccacagttggtgatcacaggccaaaattcttcattggccatggataagaaaaggattgcatccctctaaattttagttgagggaaaatctccatatgtattatgtcgggattcttgcagagccacacatatcagctctttagaggtctgcattcttgctggaatttagctaatgatagagataggtatgaataccttcattttctatgataatcttagtgaaggttgtgcaggctagtttttatgtcaacttgacacatggtggagttatctgagaaaaaggaatcttaaatgagaaaatgcttccatagcattggcccggaggcaagtcttttggtcattttcttgagagataattggtatgtgaaggtctaattgtggacagtgccatccttacgtgtgtggtcctgggttctattaaaataaaaaagcatgaagaacaagccagtaagcatgcttatccatgacttcttcatcagctcctgcctccaggtttttgcttgagttcctactgtgactttctttaatgatagagtgtgatgtggaagaatgaaccatttttctccattagttacttatagtaatgatattttatcacaacaatagaaaccccagttcatacaataacattagctatgatgagcataccctatgcaacacatgttaataattggtaagagtagtattgaaatgggtcctcaagtagcctatattccaatgaaaaaaaaatgacaaaaacaaaacaaaacaaaaaaataaatacaacttttagctatcatgtaacaaaagaatatggaaaatttctataatcatacttactataaaaaatatgaaacaggaaaataaagacggacttcctagggaaatgtatgtagacaagaatgacagggaattcctttctcaagcaaagaggactaacagatgccaagaatacaattgagagtagttctagggtgtgatggtttgtatacgcttggcccagggaatgacactattaggagatgtggccttgttggagtaggcgtgtcactgtgggcatgggcttaagaccctcaccctagcttcctggaagccagtcttttcctagcagacttcagatgaagatatagaactctcagctcctcctgcaccatgcttgcctggacgtggccatgctcccaccttgatgttaaaggactgactgaacctctcgacctgtaagccagccgcaattaaacattataagagttgccttggtcatggtgtctgctcacagcggtaaaaccataactaagacgtagggtaaaattgtttctgggagaaacacatgtagcagttggagatggttctggaatattcgaacagcagaaagcaggctgatatggctgttttcagtacctggatgtggtgaaatgcaatttattagctgctgagatcagagcatgtagtttgttgtaagtcctgcttaataattcgtgtgttattttaaatgggtgtcaagagagcattttaaatgaaggagggtgatgaaacaattttgcttctaaaataacattctccctattacgtggtggatgaattatgatccagacaggctagactgttgttattttgaaagtcctaggacagtaatggtttatttcttgtttacacaacctagcaggactagattaaggctccaacaagtatctttttcatgcatgaatctaggccacatttgtcccgtggctccaccatatcaacatgtgctctcaaagatagacaataatgatggactgaaaggatacttacatattttatgtgccctgggctcaaagtaatgatcctatttcactcatgtctcattgtttcatgtattagaattcaggcttgcttcctacaccttcactgagcaaaaggctgagaactttaggaaacaatgttgatgttcaatgcatagtaaatgcctgtaatcataggaggccagcaaagatatcaggtataagttatagagcagttttagtaagccaagtgataaaggtagcagggactggagaggcaacaagtgacaaatgacatagttcggtttcaagatgtatcccagaagcagaaccaatagctagtaaattgttttcacataaggataaaattagggatgaccttgatgaagtctttggcttagtcactagggagatgatagagttcatgcccgaacatagaaagatctggaaaaccaaagttaagaatctgaagtgtgtctacagattttgataataaaaattcactttgcaaattattgtctctgagttgtctgttagatctccaacagagatatcaagctggagcctgaatatataaatctggtgcccagggaagaaatttgagccaggaatgtaaatttggaagtaattagaacattggtaaattttaaaattcacagagacctcatcaatgttattgtattttctgttctcagaacaaccaagtggctagaaggagttcaatgggtttcctcaaggtcattgttaatgtgtgattgagataggtttcaaatttatgtgctctcactagaagctatttgtaaatagcaacatgctgggaaaaggaaaatcagttttctgcaataaattatcactgggtatatcaaccacactgcagggcaggccctatccccaggaatagctggccaacacaagcggactctgtggtttgtgtgtgtgggtttagtctttgttttgtgcttggtacttttgtcttactgatactgatttggtttggtgtttgtttgtttgtttttccttgctttgttttgttttgttttgtttttatttttgtgtttttgagcaagaaaaataaaacctgaagttggatgggcaggaagcagggaggtggggagaatctgagagatgttgggggaggaaaaaaatatgaccttgtatgaaaaatttaaataataaaagaatataaaattgctgagagtaaatatgaaatactaccaaatgacaagtacatgaagaatgtataatatattaaattgatttaattatgccatttccatatatcaaaaactcacactgtattccgtatgtgtaatttgcaagtttaaaatatcaatttacatctcctcagagttgtagtgaattttaaaatatttgttgttaatacaactctatagttgtattaactatattgttaatcctctttatagtacatcttatagctctcagccttttttttttcatgtatagttttatggttaagatgccaaatattaagaagccatactttcctcttttcagttgatgatatgggacattaggtggtcccattcattgaataaggccacctgttatttctcaggcaactgcatttgttttaagtttcttcactgtaacagtaaattgttgtgtgcagcctcttagaacgtaaggagttctgtgaacattgtgtttcataccatcttattccattccttgtagtttggttgaaaatatcttgaggtttgttgtaaacttagtgttttggaagtcacagctgcgaatattggggtacacaaccatagagacaattgcaccttactattgtgacttatttctcagctattgccttccagctcacagaagtcaagtctttattacatcacactgaggcatgtactgatgtttttctgcttgcattgttgtagtaagaaataggatttatttagctccgatccaagttttctgtatatctaaagaagattcgctggaactgaaataaaatgctattttctatttatgattgtgagctagaaaattagaaatggataaagccatttttcacctcctactcagcctcagttcattagcttgtttgggtttaaggcttctaatattcccctaacatcataatacttttaaaattcttatctctcaattcctatttcccaatttcaccaatttcttgtttcatatactaatcattctcagaatacattttatctcacttattattactctaatgtttcttatctgagtatggatgattattttattccctgttctgggggtaagagtcatgtgttttctaagaagatcaaggacctctggaatgtcaggttaagaagaagggacaagggggtaggggttgagtcctatgaaatttccaagttgaaccagcacaataatgcagctctaagaatgtcaaatgggaagaaaatgggagttggcaaaatgctgaactcagtttatacgtagttctgtgtcctgtcaactgccctagaggtcaggtgagattcttcaccatggaaataaaaagccttgggaaggttctttcctttttcctgcttgcctacagctctacttttcctttcttcctccactaagtaatcctatgctgatgtagattctacagcgtgcagcagtattttgtgagggatttccagtgtaagtcagattcaagagttctaagttcatatctactttgtgttatttaatagagatatagacagacagttgacctcagtttttccatctttaatttccaattcctattctcattcttattgctcccttccttcctctttacctcttccttcattcaagacccctttcctacttcagtactgaggatagaattgagaaatcgtctataaaaggcaaaactctacccttgagttatatctccagaccttccttggtttcttaccagaaaaatcaaggatagtaatttcatttttacttaattcataatatatatggaacacccagagttcttgtatgtgacaagatctgtatagtataaacatatccatcattgttgaagagattattttagaggccaagtgaatacagaaaagaataaactagccaatgtttataagatgaacacaaggtcaaatacatcagagactgttactattgatgcataacaaataacacaagcatctgatgacttaaaagagcaatgattaaattatattatgtcctattataataattatagtttttcatctcacagattctaaatgcttggctggttgagattttgcaccttgtgacacttagttatactcaggagggttcgagaggtactgtatgattagtaccttgatggaggttgagctcatcaggaactacatacaagggcacctacattcagccttttctacactgagaccttagaaccattgactctctcacatggtggcatctcctagaatatgggtcatgggaagaccaagtagtattcagaagtcatatgactttgcttctttcgaaatttacaaattatgaataaacctagctcagtagtgtcaaagcttcatttccgctgactttggctcaaggtccagattgaagtacagatgaagattgatgggtgaaggttcttggtttcagttcccttcaatgtcaaggcctccgtctgaagacttaagtcatatgaattccttctactcaatgttacaagataggagggagaagttagctgcaacacatatttccattcataggggaggaattacacacactacgaccactggtccattatgtttctaatatccccctggatgaagctcgttaactctgtgattagaacctcttgcttctttgaggacaccagtctcttgacaccagcttttagtatatttcacattgcttttacatgttagctaccttcccattagaactataaattctgggttctaacagtcttctcagttttttttttcctgcctacaaaagttaggagatttgaaaacaatgttattttgtattctctcagttcaatttaataaactcagggctggtgatctaagtcctttaagacctctgtgggcttattgctaagtttgttgattgctggctacattaagtgatggtccacgaatacatttctttgagacgggatcttcttttccttgaatttcctaaagtatgctgtggagttttagaacttctgttgtttaagagacattttgtgataagcacctccctttatttctctgaaatgtctgtgagacaccatcttaaataattatgaggtcttaagaaatggtgtttttttttccagttatctcttactttcctgggaccacactggatttttttctgagaattattcaggatttcattttgaattgagaatatttctcctcctcctcctcctcctcctcctcttcctcctcctcttccttcttttccttttcttcttctcattccatttgaagagacagggtaaaaaataattttatttttaatacaacctatcttgggttctatatatcattcctaagttcttctttaaagtataatttcttctctagttcaaccatgaattatctatatatttgtgcatggttataatacacagctatggaccacagggactgtaaagttctgcctatagctctcaaatctgttaagttatttaacaaatctcctacttttcatatttatacaggggcattgttctaacatttctatcactgcgtaacatgaacagcttttatttcatctctcaatgttttcctttaggtttttgtaaacaaaatctttgagttttgtatatacaagtagttttccttagcatttagttcttcaacttagcctcaaggccaattatatatatatactttataaattttcttatagttataccatattactagatatcaaattctataattataagtacattacaaaattgggtattataattaaaattgcttttagagcttgtggattctgttatatcagaggtttggttaagactcagcttcgcaaatcttttggtgtcaattgagttctttcaatggtattcttcttgttgatgcactggtcttaaggattcaagatgattgtactatatatcagagtgctgtggcagaggtggctggaaggatgatctcattttgggttgatgggtggagtaccctttgcttatactctagcatggtggtctcagtgttgtaccacttatatcgaatatagagtatctaagtggttctcagttggccattaattaggctaattctgtcttctaagagaactttgataatgtctgagatatttttattatcaccctgtgggatgctattgacatctagttgataaaggttaaagatgctgaaaaacattttataagccactgaataacatgtcctccttaaaaaaagacaaagaattgtctatcctgaaataccaataatgtcaagggtgaacatcattgttgtagactgagtatctcaaaagaacaaggtagagggtgcctgacattttctagccacttcaaagacatgaagtgtgagattcagaccatatcgaaagggaaaagtatttggatattttgtccttgttgtttgtttgttttgtttttgaggtagtgtctctggccatatagccctggctgttttgaaacttgctatatatatactagactggccttgaaatcatagtgaccacctgctatattctacttttgatagactatagagatttactttacagaagagcatgtgggagttccagtagcatagtagtaatgtgacagaaaagtatgtggagtgacagtatcagaataaacttcaagagatacaatctgcaataggcattgacatggaaatccaaattaagagatgccatgaactagagttagcacaatgccttagatgcagggagatgagccatatctgcttagggggtgagggaataatgttttctcaaacagggaaaacaatctaagaaccaataaattaaaccttcgaagaaagatagtttggtggaagtatattcaggcaaagggggcactattcaggacaaaggaaacaatagaaataaaaggactaatagtcaagaactagtcagtaatatctactttccttagttcagcctacaactttgtaagtaaagattgtcagaaccacctaaacccactgaatattttaccataaagatcaattgactatagaatccttggaaatttattgtctggtcatttgtgaaaaagcttggtgatccctagtagatcttcaatttatttattcattaaaaggttattttaaagcatgtgatatgagtcagaaatcatgtcagatatttagtttgtaagagtgaaaagaaacaaaaaaatgtcaacaaaaaatatcctatgtagcctgaaagttgttttttcacaatacagtgtttcagagtgtgaaggaaatagtcagacactgtgcttggaaatattgcaaacacttagaataaatgacctagaaaggttttattcaaagtataactcatcaggtaagaccagccagatgagagagtgccaaggatgggatgtgaatcagagagataagctttatcagggaagagaagaaaggctgtatccagagttctttaataaaaatgaccttggcttgagagagaacatgacaggcagccaatgatactaactgaggtgggtgttagaggaacaagtggaaaatgtagtgttggttgaatctgaagaatagacctggacttgagtcttggagtccttgaaaaggattatccatattttacaagtgatgtgaattttaagatgataacaataaaataatttccatcttacaaagaaaaagaaagaaaactctaggacttgatgaagattaatagataagagtactggtaggtcaaagttttggacaagatatgatgtactataaacaaattgctatgttttcaagctttactctgcccatgtatgacctggtcagttgacatagaatagactcaaagtaagattctgccagttcccagaacatatacactgacaaaagtctagagtaatgacaaagtgcctttttaatgatctgttttgttgatggattaattaattattaactaattgtggtacagaggatcaaacccagcaccttatgaataccaggtctgtgctcctctactgagttacatctgccttagatgccatttatttaatctgctttaccaaagcttttctaccatgcaaaatattagttttcaacacaaaatcatttcaaaaagaaaacttacctcagggactttgaactattgtaaatgagtcagcactgaaggagccagccttttgtagagcttctgttatggggcataacatgggtttgttaaaagctagaatttgcaggaaacatgatatcacaggcaataatgaggaagtgcccagggggtgatgaaaaacgttaatttcctaataagattttattaagtgaatcaaaatgaagaagcaatagtttctctaaaaagagagattatctatttctgaatagatagacatgaaattttaatacattgtgcaagcattaccatagctctatgccagaatattataggcttgacaaagggagatgcttactcttgaagatgtgagagaggatcacaagagtagttttaaaccacaaataggaattaaagtataaagagaaatgaaagtgactaggctaaggagatgccccaaagattagagagggtgtgatgggagacactgccttttttttttttttttaaatctatagggattcgcagaacaggctcgcataatataacttgtcttaattctaaaatgtgactaatgtgtgcggtgtagtcaattctagtcaatacaaactaatagaactcagaaagctattagtatgggtttgagcatagaatagacatgagagaaagaagcagactctaatgagagctatagataaggatatttgaacccaaggaaagggtataaccagcaaagtaacttgccaaagatcccaggcttacaagtggaagaaatgggattctagcctggcttgttctgctgcagcattactagaacatttggtttatttgaagagacaaaaccaatgcacctaagacaattaaggagagatacaaagccaaccttacagccataagctggatcactgtgtagtttcaaaatgaaaatcgctttagtgtttttcttatgattataaaagcaatgcttcctctctgtacaacaattcacatattacagaagtgtattgtgccagagagaatgttccctgaaatcttattgctccaactaaggcagaaacagccacttatagcagcctttgtgcttaggcaaatgtgtgtatcatctcacaaactgaaatgagcattagaaaaagttgaaaaatgctatgtttaatattatataattgccaccctcttggaatcatttgcagataaagctttacttacctttttttgtgtgcctgttttttgagacagagtcttttttatgcagctcagaacagccttgaactcatgacattgttcctgcctcagcctgccatgtgctagaattaaaagtgtatgccgccatacatgactttatgttattcttgaacatttaagcaggttcactcatttttttctagacttatggatgtgttagtcatttgttttgtcgctgtgacaatactctgacaagagcaccttaatggagatacagtctatttagtctcactattcaaggttgatagatcatcttggtaggaaactttgggacagctgctcacattacatccacaccaagaaggcaaagaatcaaatgcctctgctcaatgcaatttcttctttttattcagttcaggacccaagcccatgaagtggtgctgaccaaggttaaagttgcgcttcccacattaattcacctgatctggataatccctcatggacatacccagaggccaacctaaatgcacataaccccttacagaatcgcccacaggctcctctcttgtagaatttttctagatcctgtcaaggtgatagtcaacaatcacaataggaaatttctatctacttgatgccacgtagctcccaggagttaaataccatcactcaagtgccctgccgtgggtggtactgttactttagaatccttccccctcatcatccttgccaaatggtcatagatatgtcagatgataagttggtcccatttgccagcacaaggctttatcgttttcaaaacgtttacacaagcatgcaaggcatttagatgcaattatctgtacccattttataaatacagataaatgtatgttagtgtataattactatcaggacactcaaaatatagactacttgtattatcctcaagaaccctggcttcctcttgcatgtaatactttccttctattcccagcctcaggcaaccacagacctattttcattacccgtaatattgccttggtgagactatcatataaatagaaccatgaagtatggagtcttttgtgtctggcctcattcacatactgtaatgtttctgagcttcatctgcattgatgcatgtgtctgtagcttgctgctttttagttctgagatagtatttggttgtataatttgtttatctattatcataatttgtttatctattcatcagctgaccgattttgagcttctatcttattgctattataaatgaagcatctatgaaaattctcatacagatagttttaagagaatattttacagtttccttatagaatgcctagatgtggatttgctgggttgtatggtaagtgtatggttattttgtaaaaaaaagtaccatactaccttctactgtggctgcatattttgcattccatatcttcaatagcacctggtaatatccatcttagatttgggctatcttagtgagtttttgcattttaacatggttcaaaaggagaacatatacatttcttgtatatatccagatttaaatatgttctttgtaaagataatttctttttatttatttatttttattggatattttctttatttacatttcaaatgttgtaccctttcctagtttttctccctccttgaaacccccaaccccaccctccctcccctgcatctatgagagtgtccctccactcacccacccattcccacccttgattcccccacactgaggcatctatcgaatcctcataggaccaaggacctctcctctcattgatgcctgagaaggccatcatctgctacatatgcagctggagccatttgtactccatggttgatggcttagtctctgggagctctggggtgggaaggggggggtctggttggttgatattgttgttcttcctttggggttgcaaaccccttcaactccttcagtcctttctctaactcctctattgaggatgccactctcagtccaatggttggctgtgagcatccacctttgtacttgtaaggcactagcagggcctcccaagagacaggcatttcaggctcctgtcagcatacacttcttggcattcacaatagtgtctgggtttggtaactgtatatgggatgaatctctagatgaatctcagtctctagatggcctttctttcagtctctgctctacactttatctccatatttgatcctgtgaatattctgttttccttctaagaaggaccgaagcacccacactttggtattccttcttcttgagcttcatgtggtctgtgaattgtatcttgagtatttggagcttttgagctaatatccatttataagtgagtgcataccatatgtgttcttttgtgattgggttacctcactcaggataatattttctagttccatccattctgtggcttagccagttacagcacctgtctagtaaacaggagatcctgagttcaaatcccagcagtgcctggtttgtgtgggaagtggtataaaggtaagttctttatctttgaaaattaagtgtaagttttcttcagatatagccactgtgaatcttttattgactatctgccaacaacactgtctcattattcttgggttctatgtcatattgttttctccagctttacatagtgagaacttggtagtgtgtgaccttccttgcatgtatcttgaagtatttccttttgctgaaaaacaaagaagagatgttagcttcaaaaagaagtcagagaatgactaaggaagatatcttacctagtgttgacatctggcatccacatgcatacatgtgtgtgcacagacataaatcaataaagaaatgactaaaagaacatgtattagatataaataaataaataagtgaataaaaacatgtagtaaataccgaattttatttagccataaagaaaaatgaaatcatgataattttaagaaaataagtggagctggaaattcatattaaatgacatgacttaaattcagaaatatctagtatattttctcccatataagattctatattttagatataattatattttacatatgcatatgtgtatatacaatttatgtgtataataatatacatgtactgtattcacaggtgggtataagcattggagctaggaagggaggaaaacagagagagaatcctaggagaaggagaaattttacagaaagactttagtgatggcagctttcctggggccagtcccttcatcccagtgaggtcttggtttcttgggctttgtagtagcagaggctaaagctctggtgtacccattgctgtcatcatgagcctgttgtcctggaaatggtggtatttccagtttttctcatcttcctcttcggcatcactagacaattttttttcctcttttgttgtaggcttgccatgaagcttctatatgtcctagttctcttactttgctctttctgattctgacgatttcaccctctaaacaagagccaagttatgctggggctggctttaagatagtataactttcacccagtgctcaattccttgtgcaaatggccttggttgagatggagtctttcatttctctcctgtcagagtgagtcactgtcctatagtttgtctggtaacataatgagtttaactgctttattaacatggtggtaactgacagcttctgcaatttaaaccctctatacctagtcttagtggctcttacaggctagatccccccatatgaatcctccaattaggcattgctttaggaatcttggccaaagacattaatattctgctctcggatgctcactctctgcttctcagatgttgtcctgtttctaagcacgtcttccttgcatttggctttgcttataagttgtaattggcaattggctgagaaacaagctcactggtaaagtggctgcttagcatgtgtgaggcctttgattcaatctcctgaacccctttcctaaaaataaaggacttgtaagcaattttctgaaatcattgctggctaaatttccaattcaggctcactcaagataagcggttcttcttcaccttgttctccatccgatcctgggatgctttgaagcatacactgagcccatttgtttcccaataatagtgggcaatagaatgaaaattgcagtgggcatattgtttcaggaaagcccttccagtgacatgacaaactgacacactgttgcattcatcactgaagcctctgtgtccatgatgccatctgtactctgctgatgccagtcataggttgataaggatagagttcacctgggaccctagctctagtagtgtcatgattataaaatgacttcctaactctagtattctcttgagaccttcctatcaggtgcagtggtagcaactgacaagtcactgatctattatggtgttgggttttatgaaacatgggatttggggttaagtgaataaactttcctccttcctttccctccctttcttctgtccttctctgccctccccaatatcttttctctctttcttccttactactttcttgctcagtctctagaataaacaaggctaggaaacttgtccctgagctataatgtagccagattgcttccattttcatcctccctccccatgcacagagaagaatgcattaaaatacccctgtaaagaagtgatagatcacaaaatccaatcttctataagagtcttgttcagtttagggttaatagctttgcatttactaagaatggggccacaaagttctaagtcctcacatattacaacttgccagtgttgcagcatgaagagcatgcccctgcccccattgactcaggaaatgcatttttctgagaccagtggcttgtgaaatttattgtccaattggctaatctctggaacagttgtttgtcataatcagattttgagcctatatatctccttcccaccaatgatggccataaccccttgctccatccctgtttctggtctgggtggcgcagatctctgcagtgaatgaaaacacggctcttatcaactagccgcagtacttgttttgtttaacagtgctagaaattagtttcttgggcactgatcttgacaggtcagctgtcaaaagtgggtgtctatggccattaatccactgatcccatgaagaaaatcctgtctacaaaatacagtcaatgtacctcggcacaaatgaaatggtctggagctatgtgcctaagtgtcaggacttcttcaagtaaaaggcttttctgactttccatttatcaagtctatcagcctcatttggttcttactggctgagacagtctccttgcattctgaccaggaagcaccctatataaccttagggtggaggtggggcatacttccctcctgtgctgactggccacaagcttggaaattattttaaactccattggattctctcattggaactatcttgatctggtcttgtagatggggtgttctgaggcattgcctctctcagaaaactccaactctggtcttaagatttgggcaagaacacatagctttgtggaaatagtctcagccatgggcactgggctctggactcatgctagagaatgataaagctttcttgcccaacacaaaggatcctgaatcttggaacatagttgcactttgatgtgtttgaaagatagaatttgtgtttcactttgaagcagttctttctttgcaggctataggatgcctaaaggccaaagagagaaagttgatatagaaagaaaacaaaacaaaacaaaacccctttaagtcctaagcaatttcagaaccaaagataaggatgataacaggcttagaagcctttatattttccttttcttatgatgcccagatcgatttaaatgttcttccattagatttgactgaatattagcaaaaatgtttgatgtcatcctgctttcatgagtctgggcttcacctgtaggtatttttctgtcatcagacccaccaagatccaccacttgcttggagccttagggcataatttgttggtcaatatgctttctctgagagatgagggacccttacccatagtttttttgcagacagaatatggacttatttggttatttgttttagaagagccttaacttaatgacagataagactctagatacacttctggctttcagttttcagccataaaaaagcattgattgaaatttgtataatcattatgctacttattgtttatgtaaaactccatttccttcctgttaaagtagtggagatactattaaaggagatgagcaataagcaggtaataatggctgcttgctatgactctgcctatatgcaatgcatatacatgttttaacatactttgttccatttttatcgacactttttctttacatataatttaggttatatagtacaaatggtttgtaccctatttgtgattcttaattaagctattttatgataggttatttcaaaattattttatttttttaccagactcaacttggcaggcaagaaatacagatatattctattttacaaataagaaaatggaccctgagtgaatatattcaacaaatatttattggcaaccttttgtgtctcaaatgctctgaggtcatctacataaatgtgagaccagctataatacaaggctcattcataaaacctgatactcacacctgcaagctcccaccgtctccaaatctttgccagttacagcagactgttatggagaggcaatcacagtgctgttggaggcaagtttggaccaaatgatggagatgagcaaggccacctgcaatgtagggtcccagagagtagagcaggaaatcaggtcctgagtataaggctctgtctagtgcaactttgcataaatcctggaggccatgagaaacaataattagctgtggtaaatataacgtaccaatgtatgataataatgcaagatatgtttatatcttaacatcagcagaagatgggagccgagagtgattagtgagacctctaccacttttctgttgttctaaaactattctaaagtgaaagcattttttaaaaatgagacatagtttttcagacccagaagaagacaaatgacatcccgggcccagtgaattgaacataaggtttcgagatgatgagcatgggaaaaagtaggattcctgggattggcatatacgtggctatctaaactgatggggatgaaagtcagagtagccttgtggttgggaaagctgttcttttgggtcctccaggaatacttggagctactctggaggaaatgaggatttattaaaaaaatgataattgacatactttgttttgaaaaatttgaagatgtattttatgcatataagggttttgccgatacgtatgtctatgcaccatatgcatgcttggtgtccatgaaaggtgggaaaggaaatgggatctgctgaaactggggttgaggatggctgtgactaccatgcgggtgctgaaaatcctgggttcttgcaagagcaataagtgttcttgactactaaggcatctctccaggcctgcgtaacttatttgaaaggtatatcccaacccacagaggatgatgatactgagactaacaaggacactgttgcaatggccttaggcagagtggtgctgcctggagcttagtagttggtagaaacaaagcatacttggagaggtatcgaaaggtagagcccatgttgctagtaagctaaaacctaagcaggaaagggttttatttcatgttcctttttgcttttaatgtcaattcttgtgcccaagtatagtcctaatataaacacagcctggatgatgaaggctaggtaaagtgctagactaggtgctcattcaaaacagggtatcaaagtgttaaaatttccccttccctgtgccaaggatgcttggcagcagctgcaagaaatccaatcattacatggaatagaatatctagttgacatattgttatgtcaggattgccttcatcctaatgatgaatgcctttaccattccgatggtaaaggacacctcaaaacactacccatacccagaagtatggaccacaaatcaggaatcagcggtttcagtgtcaactaaacggttatgggctacagatgcagatggtcaaaatgcaatctattcctggcccttagattcattctgtatcatacaaagggatcagggaaccaaacccttgacagggtgtttccttttgtctctgataaacattttgttttattttaaagattgtatttacttttatttgatgtatacaagtgttttgtctacatgtgtgtaagagtaccacatacattcaatagttgtgaggcctggggaggacactggatctcctggaactggatttataggcagttataagcagtcttgagggttcttggaactaaacctgggacttctacaagagcagcaggtgttgttactgctaagccatgttatctttggccttaatttttaatcagcttcatattcagtctgggtactatttcttggaaccacagtggggaatagccacattgttttttcttgtttcagttctcagagaatgataccattaatatctttgatgtatttgattagaattcttgggaatatcaatttactctaaagtctagtgtgctacaaattagttagcagtggtgtgggctctttagactatgtgaccatgctttgtattaaattattttgtctctactggcaaacatcctgttatttaagatagagtatatattagtagatattggatccaaagtgacaataagaaatgccaggctgcttttaggctggatatgggattgtataatctcattctgatggttttgttttaggtctcagagttataatatccctcgtgtgtaatgttttctcaacttctaggatagtggcttcttccggttgagtatcagacatccagggagtgctgggcaagtagatgtatcctacgtacagctttaacagctgtttgagagcctcatggtacatgtccagaggaataaattcggagttaaataggtatcttgtatttcttccctaatgaagagtgtgcactgcatagagctgtttgatccattaatttcttgctatataaatggtggtcaatggagcaacagcagcaacagtacctgggagtttgttagacatgaataatctcatcagaaagtgcatagaaaagccatgtgacttgcacatatctgtagtttgagaactacccgtttaactaatagcagtggttcacaatcctgactgaatgatagaatcaccagaagaactaacatatccatatattgtccactagcagctaattaaatcagaatctccatagatggagtaacatgtgttcaaaaagtcctccaaaaagagtccaatatggagctatactagtaggtcaggatgcattaatatttcccataaccagaccttgaggtttttatttagttggtttaagaagagtctattgtcatatatattttatttctttaattaatagttgggaattattgacaacacaggggtctggtcattatatctggaaccttgtagtcactgttcaaggaacagtgactctcgaacacatttgtcatctcaattgttccaaagccagagtcttcttcatgttcttagaatatgcatcagagatacaataactagatatagcccaaggcctcataaagatactggcagataccaagcttctacctacatatcattaaaagttatagagcttgcactataacaaaaataggcagagagaatttagccttgggtatcataggccccaggatgcttggcaggctatatacttgtacttttgttaattgaatattattctcaatttaacccattgcgataccatcagatggaaagttaaaggcacagttagggaaaaggacacactgtggggaacaccatgacatcatttttatggaggacagaataaaattagatataaacactccagaggccaaatcctaccaattgactttattttattttaattttggaactctcgggattcagatgagatgatgggaaaagagaaactcgttgtttgatgtatctctttcctctttatggtactgagatgcctctgagtctctaagaagtccagctgttgctgtctacctatctgatttaagatttcagtttgggaagagcccctgaggtgtttacgaggcttccatcccttgtcttcaatcccttactcttctgtttttccttcacagctggccacctgggactcggagaagggcttgaatggcagtctacaggagaggcccatgggcagccgcctccaaggactgactctcaaagtggtgactgtcttggtaggatcatggggacatcctggggactttgttctccaggtctttgagtcagaggctgctctatagttaatgcagggttgaggaggggatattaagttctctccggttattgcagggtggagaagggggtcttgagaagccatctgagttcccaggagtcctgtcattcaaataatgatatggatagcataatggacaataagatggaagagtctcccgaagggcttctgggattttcagggtatgctgtagaaggaccactcatgttgcctgctgctgggctcccaagaatttttagaaatgtgacctgggtcttgacctcctgctactccttgggagaacagtgtgggtagccaggctctccaaaaagatgctcagggaagacattttcctagtacccaacactgttgaggggaaaagtgataataaatttgcaataaataaatgttcattagttatactttttctacatagatttcctagagtcatagatttgtacaattgtcagattcatattcccttttgatttactgttttcttatagaaaaacttaatttttttctcattcttgggtaggctagacataactcaactctttccttcccactaagaaactcacaaactgtctcctgcagcatttctgcattccctatgtacataccatgaatgagccatacattctgtttcttttaaccaaagtaactccattagatgcattccttggggctctttgccctcagacattcatgttcagtttcacacaagaagaaatggtggggatggatgactgatatgttttatagatgctcacctacttcccaggacatagcatatagtctgtaggtgtgaactcaacatggtattggattcatgatctggggctttaattctttcctatgctttgacttatggtgtaattttgacctgcttatgggcttttattttctagtataacccgatcgatggaatggtgtcttctttctatctaataccacatagatttatgaccacacattattctacataaaaagtgttacaatttttctgtggctcccctagaataatggcatatactaattatagaatcctatgtcagtatgaattctatggaagaaggaaagaatatatgccattttattgtgggttctgagggttaggatagaggctaggaagatatacctgggacaattaaatccccagtgccctgtgctgactggagcatggttcctgtgcactgtaccttgactgtccataaactgcttttaggaaatggcagaggagttcagccttggggtagaaattgagtaagtaccaacatttcactactgttgttattgttggtattattattgtccatgctggggatggaacctagggtcttgcatatgctaaacatttgcttttccactgagctatgcccccagccctaatgctaacattctaatgttatagttcattatattggtctccgtaccaatatcctgggaatatatgtcagtaaacctgttgggttgaagaatgtttattctgttttctgcaggaagagccttttgtgatggtagctgagaatatccttggacaacccaagcgttacaaagggttctccatagatgtgctggatgcactggctaaggctctaggattcaaatatgagatataccaggcccctgatggcaggtatggtcaccagctccataacacctcctggaatgggatgatcggggagctcattagcaaggtaagtttcaggatcagggccacaaagagcgacattccaatatgtctctaagagatacctgaatttggctcattatatgtttgagtacttgagattacacggaaacatccctttcctctccctctcgcagtctgtgtctgtttctgctcttttattttctcataccctgacgccctcaacttttcccgttttgtacattattcatcccgttggagcgtacccactataataaaccttgtccgtaattaactcttccattaaccacttctgtacttggcctgaagtgggaagcccatctgcctcccaagaagttctactgagtgcttgttcttcaatgtctcacagactacacgtgcagtgtgtgcccgtgcaaatgtgggcgtgtaaatgtgagtggtcatggccttgtgtgctgatgagtggcatccccagactttcaaataacaatttcacattgtaagcttccctcctacctgcagactaattcctcattggaacttacagcatgaaggtgattcatcctctcctactcttattcctgttaacttcatggcttctattacaatcgtgacccccatctctgatattactgctttcactgaccttgaaaattcctgacgtggctgtggacaaacctggactcacagtcccttgtcacactgacatctagtcaattttagtgtaaatatccccccgtatcatattagcatcttgcaggacaccctctctgctacttcatgactacaacttgttgtgcttctgattatttaggtgtgtgtgtgtgtgtgtgtgtgtgtgtgtgtgtgtgttgtgtctttctctcatgaacacagaatcttactttttaagcatgtgtagtatctactaggcctattactttgccagtttcattaatcttttattgtaaaagaaactttattgtactagaattttgatactataaaaaaatctccagtttaaatcttagtttcaatgatatttagaaaatatgcagagattgtacaagcactactgtaatctattctctaagcacttccattgtcccactgcggtcattcatatcagttatagttgattttgttcttactcctatcccatagtcttcttgtttcttctgtagcagtggctttcgaccttcctaacgctgcaaccctttaatacagcacctcaagttgtggtgaccccaaaccatgaaacgattttgttgccacttcataagtttgatactgttataaaccctaatgtggatatctgatatgcagggtatatgatgtatgacccctgtgggggacatgactcagtttgagaaactctcctccatattgctgcaatgtggaacattatgtatacatggacatacatcatgtgtggtacctggtgtgatgccctccacttgacatacatatgtgagatttattactcttgtatatttctgcacccctctgacactgtaggttccctacccagtgcaccctttgtggtcatccataaaaatcctcatgcacttcattccatattatttcctgtgttcttgattttttttgttaaattcaaatcttttttgtttgtttgtttgtttgtttgtttgcttttcgagacagggtttctctgtgtagccctggctgtcctggaactcactctatagaccaggctggcctggaactcagaaatctgcctgcctctgcctcccatcttgaatcatttttattatctacccttgacgtgtacattcaagtttccacacaaaatctagaggtctgtacagattaatatatgggtgtatatgctttctatcttcaactgtctccccatttctcctttatcaggtgccatagctacatccctcagagaggtttcacacatttcctttttgttctcaagatacctagtaacttttgttctttctcagaggaaaaacaagttatccttatatattttggaaatgagttgaaacttttaggtaaaaattctacttcctataaaacacaggcttgtaagtacagggcttccattattagtgagggactatgtcttctagtcacaggaagccccctgaaattgtattttaagttgatttcagtgtgcctcctctggatcttgctccataaataagttccccatccatcctatgctattaacctcccatgctccaatttaatctcttttatagttctttaaatactttatgaatattattctttattactctgtgtgtgtggtgtgtgtgtgtgtgtgtgtgtgtgtgtgtgtgtgtgtgtgtattatgcatttatacatacatcactgagttcacaaggaggccagaggacagcttgaggagtcagttcttttcttctaccatatgggtcctaaggaccaagctcaggttgtcaggcttggtagccggatcctttacctgctgagtctctcaggggctctggttctcagatgttaagtattgtgcaaactcccacaaccttaaaagaggtttcttgatctttggttctgagaaggaacataagaagccaacaggctctggcataggtacctgcaacgatttcccatgttactttaggttgttagaattcaacttaggaccttgatatatctctgtcttcaagttcacatattaaatcttataagttcgttctaagtacactttccctacttgaacttatagttaagatatgcagttttaattggttattctaaaacatacctatttctgtaggttccttgaggcaaggtcaggatagtgaatatacctttcagcacctctgtgttcaaagggggattacaggtcccactatgcactgctcagtcactgaccgaagcatggaacttgtgacctttagcaaacagttcgttttaattcagtcttggaagatgatttttaggttagaacatggcatatccagagagactcttcctaactataggaagaatgagccaacatttcttggttaagagtaatatatgactcctctattctttgaggatattactttggcttaaagtatgtacataaaacaggaaaggcagcaagatcatgcagaaagtaaggatgcttgctgttcaagactgaagggcaacatttaacttctagaccccatataaaggcagaaggagtgaaccatatataaagtcgtcctccaacctctacacaagtacctgcaagtacacttctcggtctccttttcttagtctgtctgtctctccagatatacatacacacaaataataaatcaataaatactgttcaaaaatcaacaaagataaatataattttgagattgagtatagaggtacagtcatttaacttctggagtattttagaagtaaaaccaattgatacgaatactgaaagttgaagaggcttgctggagaaatagtatatatctgtgcccttgtcaggcagggaggatgcaggttaacctcgaaggaagaaggtgtccttggtaggaagtagaaggccacgtgcccttttgaattgcacttctacttggtggcaagtatcagtactatgacattttgcctggaatacaggcagaagcaacaggagtcggaatatgccaggtaggctgataagaaaatgaacaagtgtaattcataaaaagtgaaagtacttcattgaattttgatgtcttggacagtggttctcaaccttcctaatactgtgaccctttaatacaattcctcatgttgtggtgaccccccaaccattttgttgctacttcataactgtaattttgctagttatgaatagtaatgtaaatatctgattttcaggatatcggatattcaaattcccaaaagggttgtgacccacgggttaagaatagaagtcagttctaggtccagggagagacatctataagatgaagtgtgagtagtaggcaacatggtgttgggttttgcttttgttctcacaggttagttctcaaacccattgcctctgaacagatctttaaaatgggtagatggtgggaccttgacctagggtagaaatcagcaaagaactcaaggtcaccgctcataaacttctttgtctttcagagagcagacttggccatctctgctattaccatcaccccagagagagagagcgttgtggacttcagcaagcgctacatggactactcagtggggatcctcatcaagaagcctgaggagaagatcagcatcttttcccttttcgccccctttgactttgcggtgtgggcctgcattgccgcagccattcctgtggtgggcgtgctcatattcgtgttgaatcggatacaggctgtaagatctcagagtgccacccagccacgaccctcggcttctgccaccctgcacagtgccatttggattgtctatggagcctttgtccagcaaggtacattcccagttttctgttgtctgactagacctggggggggacagaaaaggttattcttcggcaagattctcagatgcataccacaaaagtcattttaaatgtaattttatttgatctcaggacagtgctgcactctgtttttctaagcaataccaagtagagattaaataaaactgcaaaaactcaacttccaatcctgattctccattttagataaaattaacttgggacttgagtgccttttcttcccctcccacgttagagtgatggctatgtacatgaggttgtcaaatggaactcagaacaagcatcaacacagcgtagccatccgtaagcagctgttgaaatatacagccttctgccttccaggggcctgatagcacttctatccagtggtgagtttcaggattgtgcactttgaccagacatcacatattgcaaatttcttcatgaggatttccaccctgcgtgcatcatagcaaaagcttttcaaggttatagaaagagaatagggaggacctttcttcaactgccacctaagggtccaaagagcaatacaggccataaaggaacagctttccagtgaacgctacctgcactgctttctgtaagtcctggttgtgtgtgagatcatccagtgaggtctattaataaaagtgatatggggaatcttatttgtctgagtttaaagaaagcaggaaagcctccaggtaggaggaattttttttaaaattttgaatagattttttattagatattttcttcatttacatttcaaatgctatcctgaaagtcccctataccctgcccccaccctgctccccaacccactcgctcccacttcctggtcctggcattcccctgtactggggcatataatcttcgcaagaccaagggcctctcctcccattgatggctgactaggacttcagtgcctacaagacacagtgcaactagagacacaagctctgggggtactgttagttcatattgttgttcctcctatagggttgcagacccctttagctccttgggtactttctctagctccttcattgggggccctgtgttccatccaatagatgactgtgagcatccacttctgtatttgccaagacctggcatagccttacaagagacagctatatcagagtcttgtcagcaaaccatattgctggcatatgcaatagtgtctgggtttggtggttgtttataggatggatccacaggtggggcagtccttccttccatctctactctgaactttgtctctgtaactccttccatggatattttgttccccattctaagaaggaacacagtatctacactttggccttccttcttcttgagattcatgtgttttgcaaattgtatcttgggtattctgtttcagtggagtactactcagctattaaaaacaatgaatttatgaaattcctaggcaagtggatggatctggagcatatcatcctgagtgaggtaacccaatcacaaaagaaattctttatagagtatgtacactctacgtgaatttgaaattgtcaaagatcttatattagacactagccctgaaagttcttgccatgatgagatagaatcttcttcctagaagactatattcttggtattatggccaatgtctcatcactagattccaattttattttatttatttatttatttatttattttgccttttatcatccttcggcctttcccaatattggtggtttgaaggacatttccttagaaatataatgtcctgtgaacacatggtagcagtctttgaccttggccaaggagggccaactcttgctgggtgagaggcaggtaaggttaatccctctgcattctgcaggtggtgagtcttcggtgaactctgtggccatgcgcatcgtgatgggcagctggtggctcttcaccctcattgtgtgttcctcctacacagccaacctggccgctttcctcacagtgtctaggatggacaaccccataaggtaagaatgcttttccttctttgctatcagctaggaaaggcttcagagaggatgtagtcttactgaggctgccttatggtggagagagacaccaggcagagccagacacatacctagcctctgcaagtggacaaaggggatattctatagaagggctctgatcctgtgattttttttttagtcataatcacatacacttataaattaaattatatttgtctgaacatttaaatatcaattataaaagtaataaactgaaatactaaaattaacaaattaaatttcctcagatactttaaattagaaagtaaactcatttaatcaaaattttatcaacattcctttaaaattaatggaggtcacaagcctaatatattttcagatcttcaaaaatctttaaattaatttttaaaaacttgttaattgggcccgggaaatggcacagttggtaaagatggtaatagccaaggttgatgacctaaattcagtacatggcatttacatgtggaaggaaagaaccagatccctcaagttgtcttctgacctctacatgccagggtagacatgtgaacacacacacacacacacacacacacacacacacacacacacacacacacatgtcaattatttagtttcacttatatttataaaattataagttttatcaagagtgaattcttttttatttaattaaaatattatttcgggcatgacttccttcatttttgaaaaaagatattaaaactctataatgaaagaataaatttgatgtcacagagttacttgtgaaaatgtcttgatcatggtcagtttcttaagtgctgttcagcttactgaaagaaagaacaaaggtacagagtaacgtgtatcagagctgatggtgctgaggagagagcaggcctgggtcctttctggacttggcggggtagcacagtggttccagcatggcctctcacctgggctctgctgttgggctcctgctttcgtgttatagttcactgtattgtcttcagcatgttgtctttcctatccatgcatctacggagtgttccgttgcaacctgttcctttcgttccaaactgcctatttaagagttcaaattccttgatgaggattcaagattcaatgtgatattatctgattgcattatgaaattgatattttcaccaagataacttagattcatatgcagttgtaagaactaacagaaagaggtctcctaggctcagtctagttctccccagtgcaacattgagcaaagctgtaatattgtattacaatcaggtgttggtactgatatgattcactggttttatttagattttccattaaatatgctacatgaagagagttgtgccccttgtctgtgtctctctcagtcagcccgatgcctcacagactattccaggttgttggtgtcggcatagttcgttgcttctcactgatgtgtgctttctgcgtagtacagtttgtttagtcttctacccactggaggacatctgggctgcttccagttcctggcaactatgaataatgctattatgaacatttctgtaggtttttgcgtgaacataagcattcatttacatgtgatcgttatgtaaaagtgcagttgccaggttgtgtggcaattgaatgatgaattttataagaaacgccactggtgtttggtgttatttccaccttttatttcttctgaattttataagaaactccactggtgtttggtgttatttccaccttttatttcttcattctgatgtgtcttattgtgatgtcccattgtggattaaatttacattttcctaatgagcaaccatgaatacttttttaatatgcatatttacttacacatccttgtcagtaaattatcagcttttatattttactcctttctagttggactgcttcaatcctgccattgacttttgagggttctttgggtgttttctatgtgtatatttttacatattaaatgtacttctttgcctggtatatgatttgcaaccattttattccactctgtagcctgccttttaaacttcttagctggatcgcagagcaaagatgctaattttggtgaggtttaatgtagaatatgtgctttcttgagctgctcatgatgtcaagtcttttcctggtctaagattttgaagattgtttccttcatacaacttttacaatcttgtgtttcctcttttgatgcataatggattttacgttgagtttctgagtttctgtatttggattgaagtttaggttgaagtgagctttttgcttatttactcttccgagcattgtttgttgagcagtatggactctgcgctgttgagagaaacttagatacaacaccaggcaggagacctatccctgtccttatagggacaatagcttaaaatatatatatatatatatatatatatatatatatatcaaaagtgctttggggaaaggcgaggccaaactctacagggctactatgaatgtggaggtggagactttcagcaaggctctcttacctaatgagaatggtttgattacccaaactaagatccgtcaccaaggccagaggcaacaaggaagctgtgctatcaaatttggagaggaagatttgcaggctttgtatcttaatggtttaagatagaatcacttactactaccagatatgggctcagtggcgaggcaacagattgggagtgtttggtgaaccatctttttttctttttctttttttttttttaaattccaactacatgaatgtatttccttttctgaaaagaaatttgaaataaacagttttagcattcatttggaaaggattaatcctttgcatagaactggttaccagccgaagcgtatctgacagaaacactatataaatgtaaacctatcagcacttccaaggtgaaaggctagtcttcccattgaccctacgatctatggctataacaaagctaaacagcatgtccagacttgtcagttatcatgattaccgtgtgaacatgcgttaaaatccaagcaatttcaagtataaaatctggtgtcatgagctatagccatcacaatgtttattagctctcctgaacatatcacactgtaatgaaaatctattctcattgacgcccagtcccttccagtgatcggtccacgctctgctttcatgaggtagactcttgtaggctctgcacatgagatcaagaagaaatacttgtctttctgtacctggttttgtttgtttgtttttacttgacatgacagcttcaagttgttttttttttttttttggttgtttttttgtttttgtttttgtttttttttttttatgtcatggctccttcatgacaaaaacgtgccaagtaacatgtgagttgtatcactatctgtttttcatcccttacaatctcttaaaccatccatccataggggatattttaggtcaatttcctatcttggccatagagaaagatgttgcaatagacataggaatgccaatttctgctcaagatagtaacttcatttcctttagccataagctgagaagttgtgctatcagatcacatagaatttctagatgtcttttatggggaatctctgtagtcgtccatattttatagtaatttatattcttattaacaacacacaaatagccattgtaataggtagattttgattcttattcatttgaaaatgaatactattgaatatttaattttcagatacatatggccaatgtatgtttggaaaaaacatctattaaggtcactcacgcattttattgattttgatataaggtgttaccttttaggtcagattggcctcaaatttgccatcttttgtttcagcctgatgaatgctgggattaaagacctgtgtcactatgcaaaggttctcgtctgtgcataatccagctatcttttttcttttcttttcttttctcttcttttcttttctcttcttttccttttcctttttatttttctctttctttctttctttctttcttctttctttctttctttctttctttctttctttctttcttttttgctgtggagtagttttatttatttatttatttatgtagtttaacatataaccagatccatggttttcagaatacacatggttttcatcaatacacaggctttttaatttcttctgtagattgttttctatggtaaagatttttagattgttataattttatgtgtatctatttactgttgtcttcatttgtgggatcatcgaaataaaaaataaaataaaatcattgcccagtccagcacaaaaaagcgttccccagtttcttttggaagttttatattttcagatctcatggttgaagttttatttgttttgagctaagacttgaaaatgatatgaagtgtttttcttctttgcctgtggaatatttaatttcccaatgccaactattgaaaagttatattcatctgtctgtatttggttttttttttttgtttttctccagtgttacactccttaggtttactctacttttctgggttactttgttagaggaaatgcgatgccctcctgtgagtttacattcttcaagattgtttgggtattcaggagtttcccttgatcaacaggatatcctgggtcatttttttctatttctatgaaaaaatggcttttgacttttgatagggttgcttttgttttagagatttcttggcagtagggttattttattaaagagagggaagtaagactaatttattctaaagccaaagtagagtgaccctggctcaattttcatatcatatcatgtgacctagggacacagaatatgttatttctgagtgcctctctgttgtatccatcaatgtattttagtatggttattataatagtactgattattttatattttagcatggttattttatgatattgatcattttaatcaatgaacacaggataatttttcatatagttctattatttataaagcttttactgtcttctctagttttcagaatttattgtatctttagctaaatttatacctaagaatttttttgtgtgtgatgaaagttcagttattttatgttcttagtcaaaggaagtatttatacagacatgaattgcatgtgatcatataaaacatatttatattctctttcaggattttaggttagctttatacaatacacatttataacttatatttatatttaataagttgcaatactcattatataaaccatgttatttcctgagatataagacagttatataactttaaaaacatctctctatattccatcctaagtagagtttatcttcctcctcctctctcagcctccatgccgcatcaactcttccttcatttcccttcagaaaagggcaggcctcccatggggtgataaaatgtggattgtattgtcactggaatgatttttttttctgttgggctattttgtatataatattattttagcctgtttttgattaattgactttctgtctaaataatctgtatattatgggagcttggtgacaaatatttctactttcctaaaattgctatttatttcttcagttttgttcatagttgcttaatacacttaggtattgcaatattatgcacatgttatacactcttgatgaactgatttttatcatacaatttttcccatcccttgtgacaatttttgatttcatgtaacttttttttgaaatatacatagacatctttcttctcttttgtttaaaatttgcacagagtatttttatgctacttttttatttagctttttttgaatatacagtgaattatttatacatagtatgtagtaggtaatataaaaatcattaacattactttaagtagaacatttaatccatttatatttaatataagtattgataaagagagattttatccatttttgttattcagattctacatgtcttataccatttttttctccattagtgtcttcttatgtgttaaatatacttttgtttcttattttaatacctttatttatttatatacattgtattctttgaatataagttattgtacatgaatattatattctcagtgtttgcattataattagcatataatttgtatcagtctaatttgcattaatagtagccttatattaatggcataataactatgcactagtatagatgtggtttatctcctaagttctccctatttatttatttattcaatttttgaagcattatcgaagtcctccttcactcactgagaatcaggattctgaatttgtgagtcttttcttcagaaccccgtagttcagctaagtaacttttctaagtattaacttttccatatgatgcctttctagaagtattagctcttctcgtgagccctcataactcttgtactcttctagacaatttcccattcttcttccaattctgttcatttctgagggagacttccattgttctgactggataagttctatttgagtatttttttaatttccttttatttttcctccatttttgtggttctcttttatttttacacacaggtttatggattccatactcaagattttctataaagagcccctcctataggtaattaaatttacatttttttcttttttgtgtgttttttgtatttatttttattagatattttatttatttacatctcaaatattatcccctttcctagtttcccctctgaaaatcccatatccactccccctccccctgctccccaactcacccacacccattcccagtcctggcattaccctatactagggcatagaaccttcacaagaccaagggcttctcctcccatggatgaccgactaggccatcctctactatatatacagctagaatcacaagttccaccatgtgttttctttgattggtggtttagttccaaggagctctgggggtactggttagttcatattgatgttcctcctatggggcatcagaccccttcagctccttggatatattctctagctccttcactggggactttgtgctctgtccaatggatgattgtgaacatccacttctgtatttgccaggcactggcagacctcacaggagacagctgtatcaggctcctatcagcaggctcttgttaatatctgccatagtgtctgggtttggtggttgtttatgagatggatctccaagtggggcagtctctgagtgatcgttccttcattctctgctccaaactttatctctgtaactcccaccatgggtattttttcctccttctaagaaggattctgagcttctgggctaatatccacttattagtcagtgcatatcatgtgtgttctttttcgattgggttacatcattcaagatgatatcctccagatatcatgtctaagaatttcataaattcattgtttttaatagctgagtagtactccattgtgtaaatatatgtataaatgcttatgtaaagaaagaggaacactactccattgctggtgggagtccaagctggtacaaccactctggaaacaagtttggcagtttcttagaaaactggacatagttctaccagagtctccagcaataccactcttgagcatatacccagaagatattccaacatgtaataaggacgcatgctctactatgttcagagcagcctctttttccagcagaagctggaaagaacccagatgtccattaacagaggaatggatacagaaaatgtggtacatttacacaatggagtactactcagctattaaaaacaatggatttatgaaattccgaggcaagtgaatggacctggagggtatcatcctgagtgaggtaacccaatcacaaaagaactcacatgatatgcactcactgataagtggatattagctcagaaacttagaatacccaagatacaattgtcaaaatacatgaaactcaagaaggaagaccaaagtgtagatacttcgccccttcttagaactgggaaaaaaatacccatggaaagagttacagagacaaagttaggagctgagacaaaaggatgaaccatccaaagactgccccacctggggatccatcccataatcagccaccaaacgcagacactattgcatatgccagcaagattttgctgaaaggaccctgatatagctgtctctcatgaggctgtggcaatgcctggcaaacacagaagtggatgctcacagtcagctagagaaggtacccaaggagctaaagggatctgcaaccccataggtggaacaacagtacgaattaaccagtacccccagagcttgtgtctctagctgcatatgtagcagactaatagacttgttatgtaaataggacccaactttttgctgtatataggaaacccacctcagggacaaagacagatactaccttattttaaaaggctggaaaacaaattttcaagcaaatgatcacaagaaaaaagctggaatagccattctaatatctaataaaatcaactttcaacctaaagttctcaaaaaagatgaggagggacacttcttactcatcaaaggtaagatttatcaagatgaactcttatttatgaacatctatgctccaaatgcaagggcatccacattcattaaagaaactttgataaaaactcaaagcacacattacatgtcactagagtgttggaaggcttcaacaccccagtctcatcaatggacagatcctggaaacagaaactaaacagagacacagtgagactaacagaagttatgaaacaaatggatttaacagatttctatagaacatttcatcctaaaacaaagggatatacattcttctcaacacctcatggtaccttctccaaaactgaccatatcatcagtcaccaaacaggcctcagatacaaaaatattgaaataatcccatgcaccctattagatcaccacagcctaaggctgatctttaataacaacaaaaattatagaaaacccacatacaggtggaaggtgaacaacattctactcactgataacttggtcaaggaagaaataaagaaagagattaaagactttttagataccttggtgtgactctaaggaagtgaaagatctgtatgataagaacttcaagtctctgaagaaagaaatcgaagatgatctcagaagatggaaagatctcccatgcccatggattgggagaactaatatagtaaaaatggttatcttgccaaaagcaatctacaggttcaatgcaatccccatagaaattccagctaaattcttcacagagttagaaagggcaatttccaaatacatttttttttatttcattttatcctgcctgtgctcttcagtactgtgcaatattatgaaagcacattggacatttgtttttttctgttgaaaactttcttgtgctttttagggtgtctttgctgtttgatgtccttgacttttaaggcctctttctgtgaaggacaattaaggttatccttggattttttttagtagtatacatggttgcaatttgcatcttacatttccgtcttttgggttgatttgtgaattcgggtagagagacataaactgtgacttacactcctgtacctggttcagtgatttttctataaaagtggtactttggagtttttgcctccaatacttatagtattctggttgatccagctcctgtaatatttagggaagtcactatgtggctttttaaaacttcctccttactgttactattttctacattttactgataaattactatttgtcagcatcaactgcccatgaagcaggtttctacacactgtgccctgcagatctctgtggaatccactgcctttctattgttgcactttaaattgtgtctgtatgtgtaaaaggaaatccactgtaatgatgtattttcaaagttagatagcctctcattaatttccgtcctgtgggaactttctctgtgtttgttaagtgtgtaacatccctacttgtacatggtatatgattactcaaagtttaaagcattgcctggttattctagtagtcagctggaggaatagatgacagttatatgtcttctctctctatcaacaatcttcttattaaccaaactaaccttcaacctatacgattccattctagcttatagcagttcagcccttttattccatctttccatgcaaatgctcataattactatcctagtaattagaatttacaaattccttaaaaggtgcacacaaaactgttatctaaaagaagttctactaaggaagaaggatgcatttgagaacttttagtaatttttttcctattcatttatgttagttccctctattgataggacatagctttcttttggttcgctccagaaatttagaatttatgtgatttccatccccacgtccgcttacatgtcatcacaattgtagcagcttcattagaaaatttgatattggaaaggagttgcacacccggggcaccttgtctcatctgtatctgtattctggaatacttgtctcaaagtccgaggtgagtagtgtcccacgttaagaggactcacactataaaagctcagtttggaaagtaggagccgaagcacccgctctagagattgtgcaccgtgttttccatgagcatagccactgacacctgactacctgggcaagtcctctttccccctctctagctctgtgacagtacgcaagtcagccttacttcactgccctctcaactatacatagtagtaatgactatgaccaccatacaaggttatgaaaagggaccagatcaccatgtgctagagcttaggtaattacgtaatgccagactgcttgtctgcctctcagctgaggtacccgagcatcaccagcaagctgcccaggggaggcagaacatagtccataatagggggccagtccatgttttcctgggtgagaaacagtggagtctgagatgaatgctttcccaggctctcatgtacccaggtacagctggcaaaccattgggagttgggactggggtccttgggtccatgcttcttgtcagggaggctatactcaaagcagaaagcagagggctgagcaagggacagtggtggaatctggtttggtttcaagtgaaggcccagagtacagaggggctagaagagagaagtccttctctgggagatttaggcacaaaagcttgtcccattgcattcattgatgaaggagatggttcttgcttgtccacaccattttctttgatggcagatgcaaatgtatttattcagggtggatcagggattaaataccttttacaggaaggaatggccagatggggagctgattggctgaacactggggggtgggtatttagatacctccattaacatggagaactctaggtttttatgttatgtgacctattatcatggtcctctcaatggggtaccttggttacatgttccagatcaggtagtttggcagggagctggctccatgctggtcattctcaattctgagattccctaggatttgcatctgcttaactttactatttcttctgtctggtggaatggtccacttgcctcacagtgtgactccaagaggaccacacagaactgtaaaactatggtttttgttttctgttgtagttgttataggtcttgatggccaaacagacatcttcagagtgtggagtcctgaagagtgaataactaagagatgtgggaaagaaggcagttgtgtaggaagtatacgactcttgggaaatgacacagaatggatggcatttgttacttggttgtttaggtccttgtttctgtattggtagatcagagaggctgttgtgtttggagatgtagatgtttgctcatctagtcattgaatttggaagcattgtatttattaggttaaacaagaaaatgcttcctacaagcatgtccttatgcttggatgctagagggtagacacatggtccagcaatcatagttcttggtatttgtccaatttttttaaaactacacagtaataccaaaaaattgatgtaagtatatatttgaaacaaattgtttttctgcgtggcacatactgatctggagatcacagtcccctgcctcaacttttatgtgacagatttacaggcttatgacaccatgtcaaggataaatatgaatctttatattaatgttattcatttttaaacttggaagtaaccgagatagtctttaagaggtgaatggataaataaaccacagggtgctccattgaagactagaatgcactgctgaaatgaacagagctatcagcatgtgaactgacctagaggacaattcagggcacattgataagtagtgccatgataagtagaaatgtgtatgggtttcagtgatggaaaagattgttctttggacactaaactgagtgtgaatcataaatagattgatattctctaattcatcttgcatgcttttcttcatggcaccatagctcacagtgctttacctggaatgtttttgtcagttcgcgcactctttagggtgcccctggttctgtaactcctttataacactgtcaattatattctcattcctgtcttgtacccataaagcactcaggcatgtaagcttcgacagacgtgacggcctctaagcagttggtgagtcccataaatccttcctacccacagtgaggtcagcgagttagcctcactggtgtggagaggaagctaagatatgctgaagcacagccagtgtggacctgtaactccagctcctgttaccgctcagcactttgtgcttctagttaataaaaaggagtatctatgcatttccagtagcttggagtgatctgccatgtcaaaagaatgtattttaacacacctacaaatcacttcctgcctttaaggcctcaaaacctgaaaaggaaagaaaagtgacatgagctaatagggcacatgaagaagagattataggtttcttcacatgttagcattgagaagcaggcaaggactagagctccaactattaacaactggaaatctgataaatctagaagctattaatacatgaaggcataagtgtgttgacagggagagagaaagacacagcatgtgtatggtaataagaaaaccagtaacattcctcatggatagcgtgggtaactaagggcactgtataataagaatggaaacagccataccagaaaaatagtatgtacataatgtcaacacttttgaaaaagaatgtgacaaatcaagaagtagaaaaggctaaagcagtcaaatctttaactacactcccctagaaaatgcatacatagtaaacaaagccattgaggccatgcatatataaacaatctcatcaattaactcaacagtgttggcatttgcaggacatttcacccccaaattgcaaaatcaacattttaagatatgcataaacatttgatgcaaaagacattgtcatcactgggctaaagcttagtcagtttatgagttaactttatagagggtgtcttgtcattcacaatcctgttaagttagaaaccattagaaataaacaacctaggagatgtacagtgaaatctagataatacgattctaaataaccaagtgtcaagggaaaaggcacaaaagaaacctctaaaatgtttctaattaaataataatgaaaactcgccatgtcaacaactgtgaatccacaatagtacttaaaggtaagtgtatagctctgaaagcctataagaaatttattgctttgaccaagttgaaggttcttagtttttcccttgacaagacatagaaatttagagcaagtttagataaaaagaattttgaagaaagaaacatgattgatataataaataaattagaaagcctaaaagtcttttgtttaaaaataaaatggagacatcctgagttaggctgggtgtagtgatacagctctagaatcctaaacaggaggatcatgaatttgatgcgatcttgagctacatagcaagctacatctgtctgtctcactctccatctatatgtctttctgtatctattcatatgtatatagatacgtatgtatagatgtctgtatagatatatagtgatactgttaagaaaacaaagaaaaaataaaagaaactggaaatttttactctcgagaatgaaagaggaattttataatagattctctagacagtaagagggttataaaacaatactatgacaagtttatgtcaataaataaaactgagatgaaggggaaaatcttcccttaaaacaagatgttatatttgtaaaacaaacaccaggccatttattaaattctaggacaagatgccctcacaggtgaatttcatccaacattcaaagaaacgatactaaccacaaactcttgcaaagaatacttttaatgaaactggaataactctaataccagcaccagaaaaggagtacaggagaagacagctgtacaccaataccatcaatgcacagaagttctcaacaaatgctaacagctcaaatcagcaagatataaaaactgacagcacacagtatatatgtggaattttatcctttagataaggttgtttaatcagttgagaacaaaacagtgtaatttataaaaataagatacaggagagaataatatcacatgatcattttaatacagaaatgtacttggtaacccatgcttgtaatcctagcactaagaaagctgaggcaggaggattgccaagaattcaaggccagcctgacatctatagtggggtttcaagtttatctgaactatagtgggagagcctgattaaaaccaagtaataaacaacaaatataccttaaagtggcaaataaatgatctataacatatataatataaatataaaagaatatgtatgtatacacatgcacacacacacacacacacgcacacacgcgcgcacgcgtgcacacacacacacacacacacataccacacacctgtaatttgaaaagaggaatgaacagagaattgactattaaattcttgatgaaatcttgttacttttctcccaagatcagtaagaacaagtagagaccaatgtctgtgatgaaaataaaagaaagactggaatgatagctcagcagtaaagagcacttcctgctttggaatgggatacagtttcagtctcaagcatccacaaggcaactcacaaccttatgtggctacagttccaagagattcagcactctctcctggcctctgcaggcaccacacacatacatggtgcacatacatatttgcaggcaaaacactcatatacaaaaaataatattttctaaaaatttatttgaaaagaagtaagaagcataaggattttaaagtaaaatgcaattcatggcgggtggcatgacaatgtttgtagaaagtcctgaaaatctactaataaaattcaataaataatttccatgttccaggaaacattcactgtgtgctaaatcattccttacacactagggaccaataactagaaaatgtaaaagaaaaaaaatcacaatgattgcaacaatgcccgcaaacaaacaaattttaggaatatcattcataacatctgtaaggattgtgcagtgacacactatgaaatgttgttgagagaaatcaaacgatcttttaaatatgaagcaatctattattcatagattaggaaacaatattgtgaaatggaaaatcttcataattgtggcatagattcagttctcataaaagccacagaaggattgttttattttgttttttgaaaaacgaagctaagctactcaatggttctcaaaactcctatgctattacccatgatttaggatgcagaatattatatttaggaaatgaaatggcaccatttgtttttcgggacttctagcacggtggtggctttctttgtgttccatctccgatctgagcctctctctcttgctgttccttccctggcctctttttgctccttaaatatcacaggcagcttcccattccctggccatcacatattttaaagacactgtctctctgttgtcagctcccagctctgcctggctttgtaagtctgctcgtgtgtcactgcttcagagtggtctctctgaacgcattgcctgattacctcgctcctttataaagcctggagcttttcttccttagcagttatagcaatttgtaaccacatatgtgtatacatttaaaaatatgcatccatacctctgcatagtaacctccagggatttagctgtttttcccctctgtataactaatgcttagcacagtgtgtgtgacacaacacatataatctggatgaattcctcactaaagacagacatgtggatttcggtccacagatacagagttgtaaacatcggataggaaagttcaaggcatattttagttcaaaaaggagaaacaagttctttttcatagcaccagacctgcctggatttaataaacaccttcaggagcctatgaatcacatatccccaaggtatatctgcagtagccaggaaaacatgagactctcttatggtcagtgaaggcgggcttcctgttgtgttccttggcttttcctccagttaaagctctgcatgaagctgatttggattttgtttgtttggagtttgtctatttttattttcagcttaaggacacaagcttttgtccagtatgtacagcagtgtcctgctgggcagcactgacaacacgttttttttcctaaaggtcaaatgggagattttcaatatttgtgtgtgtgtgtgtgtgtgtgtgtgtgtgtgtgtgnnnnnnnnnnnnnnnnnnnnnnnnnnnnnnnnnnnnnnnnnnnnnnnnnnnnnnnnnnnnnnnnnnnnnnnnnntgtgtgtatgtgagtgtctgtgtgtacgcatatgtgtctgtctgtatgtttatgtgtatgtgttgtttgtatgtatgtaggtgaagtgtgtgtgtgtatgcacaagtgtatttatgtgtttgtgtgtatatgtgtatatatgtgtgtgtgagtatgtgtatgcatgtaactgtgtgtatgtgtgcatgtttgtgtatatgtgtgtacgtttgtgtatatgtgtatggatttgtgtgtgtatatatgtgtgtgtatgtgtatatgtgagtatgtatgagtgtctgtgtgtgtgtattgcatatgtgtgtgtgtgcatatgtgtgtgtatatgtatgtatatgtgtgagtgtatgtgtgtatgtgtgtgtatatgtgtgtatgtgtgtgtgtttatcattcttctagtgctcctttattcacagatccatgcacattgtgagaaatgtaatctgcagtctgtgtattgtttcatattccaaaagtgagattcatgaattgaaaagcccaaattttatagctagggtaagtcatccatatgtaagcacaccttagctctacaatttgcatccgtgcttgagagtctgagttcatgatatattagtaagaacattattactcaggaaaactagcttcccaagggacttgtggacaggtgtggaatgggaatgcccccttctcacatatcttatccagaactgtatcattctgttgtccaagaaacaccaaggatagccaatatctgaagaagattcttggttcataaggaagtctggagatagacagaacccccacaggcttcctctgtagactatggtcaagatcactgtcttgtggctacttggatgtggctatgtccagggtaccaaagagcctacaattagtgttcttcccatttcctcctaaaagaaaactagtgaattttgtattttgagcactttggtagaaagatctgtgttcccatgtacttttccctttccccacttacgatattattaatattttaaggaactgcacaaccattgtatcattattgacatcattattggataaaggacacagtttccctgggcctgacacatgtccatcatcatagttccataaagcttcactgtgcactttcctgtgttctacctagaaatcttcctcctctttgttatctttgtgctaatttccagaatcaagttagggaccacacttcgtacaaatactgtcaatagcgtctatcgtgctgttccctagatctctcttgtgtcatttcatactcggccatatctaggtcttgatgactagtttattaaaacaatcttttgggttgactttttctcttctcttttcactccttgaaatctttgtttatattgccaatagaaagatcttggtaaaatcaattctcaggttttatatatctccagaggatccctctgatgttgtgtttataattgagtttctatagcacagcatctcttatgtagctatgtgtgtgccataatgctgcaaatatccacatattactgagtgtcttcatattcttcatgatgttaagtactcaagaggctgaaatttctagacacaggatttttggtatgtgtgtatgtttgggtttatttttgttttatttattgttttgaatcttacagcattttctttctttcatcattttgtatggcagttcctatatagaagctgatttattgaattttaacgtttactatatgttgtcagtagttttctatcactgaacttaataaattattactcttaattcatagctttctccttcattagtcacagtttcttaaagacagacattgtgtcatacttaccttagtgtttcccaggtcaagtgtagggcttagcacttggctgtatattccaggggtggggaaaatgactagccaaaagaactagaggcctatctatcacctagaatgagaaggtgctttcaaagctgggaggagaagagggtccagagaaattatgtacctggaactgctgctggggcgagctgccacagttggttgtaccatatgtttgagttcgaaagtgatgacttaaggtaagactacccagtatgcaatgggacctagtcccaggctcctttaagctgagagcagagtagtgagtgtgttgatcatctcctctgctggtcgatggctgtgcagctatcccccttctagaagttcagatattcttgatcgtctattacttctcacaagctcagttcgagtattcttgaaaatgggaagaatgcttgtggcaaatttggaaccttgtggagctgtcaatatttcaaagtaagaggaaggaaacaatttgctactggtgcaagtaaagggaagatttgagagaaatttaaaaaaaaaatgctcttcaaactggtaatagatgagcaatgaaaggtgaatcaggccatgattggcagtttgcatagcctatagaaaagcagaattccaaaaaatgtcagaaaagggagcattttgggtcccaacagtatgagtcaagatagaaatgtctcatataatgagacagtagtgatcggtcctaaaccatcacaaatctcagtggggaggaacagtgggcagatgctatggctgagaatgtagaatgaaatatggaaagaaccaggtaacaacaggaactaaaacagggatatccccttgaaagatttgctaacaggactccgttttaaatttcaactggggaaaaaaaatccttgaaaaagaacaaataaaactttggtagaattgacttctactgtctagtattttactaaagccaatcacaggcagagagaccagtgctgaaggaagatggagaagtaatttacagcaaatgaagacagaattatcactgctgattaagaaccattgggttcaacatagtgtcagtacagtggcttgtggactgtgtaacttcagttggctcctgtatggatctgagccttaattagctttcatacttaaaaaagagacacaatgataccaattcactgtgtactgtgtccactaattaaattagatagtatgggatccagcacagtgctgccattcagttagcactcaataaatatacaactccatcttccccatggtttcttccaactgaagaactattacaaggattatatattatataattgtatatgttttatatgcaagcactctgctgataacatttgagaactgtaatgcagtggtggtttggggaggagctgtcttaagaaggtgactttgtgaatggtgggtttgaatccttattgatgtttttatttgctagaccagtaaattgatgtgccactgtaccaacacttatgtgggaggaaatgtgtgagcacttggaaagggaaaaagtagtccctatgtaatagttctaattccccccaaatcaatcactttgtattagcctaaccttactcaacttgttttcctttgcccttgataagcttattatctggaatgtcagaattattctctaaaccttaattatatcttgatttcagtaaagcttttggtagttacatagagtcttatggataagaaggaaaatggagtcatgtaattaaatacatttatatgcttaaaacgagtcccagggtatcaataaactaatgtttatattaatatgacagatggttgcaaagttgaatggtagaaaatgctgactttaaaatatttttgtttaataatcatcaaatgcatggtaagccagcaagagtcatactaatcaattgcagagatgatgtaacatttgaagattatccatgttttatattgagtgtattattgtaaaagtatatagttattaaagataattaaatttagagaaccaaaagaaaatttacaaactacaaatatacaggggtgtatattttaatatgttgttacattttgttgcagatttaattatggtgagttcatacaggcatggcttataaaacctttctccaaacaattttgttaaattgagtttttccagttgataggctttctggaaaatttgaaaatcattttatgtattgtttctatgtgtttgggttcataccatcaatttagttcttgattggttttcaataggtgttttcaacaagaaaatgggactttttaaaactcttacattctggctgatgtgttttgcatgtgcttctgtatgtgggtaggatagcttcagtcttaaaagcaaggtttatagcctttttctagacagaactccctggttttctttgtgtgcatctcttcctgtcccttaaaaagacattcctatagggtgctattgacagaattgttaaaatgttcataatacacatggttctgatctcattccactggactgccttggaatgtggagagcacctttaattatatgatcagtacctctgttactttattgtgtttgtaatagtatttctgtttttaattattgtgattttgtctttaattatgtatgtctgtgcttttgcatacaaatgaatcccctgtagaggctggaagagggcatcccctgtagatgtatttacaggtagttgggagctgctctatatggatgttgggaactgaactcaggtcctctgcaagagcagtaagtgtttatttttattattgttgtttttgttgttgttgttatatttatttaccaaatgctgctgccttccctgatctccctcacagagttcttctctcatccctcctccccttcacctctgagagggtgtgcctcctgcacccacatccctcttctcttggggatcaagtctttacaggattaggcacatcctcacctacagaagtcagacaaggcagtcctctgctacatacgtgtatggagcctcagaccaacctgtgtgtgctctttggttggtggctcaatctctggaagctcccagggtttcaggttagttgacactgttggtcttcctatggggttgccatccccttcaattccttcagtccttcccctaactcttccataggggtccctgggctcagtgtaattgttgcctgtaagcacctgcatctgtcttagtcagctgctggtagggtctctcacgggacagccatgctaggctcctgtctgtaagcacatcatagcatcagtaatagtgtctgggtttggtgcctgcccatgggatggatcccaagttggagtggtcacctggtccttcagtccttcagtctctacttcatttttgtccttgaatttcttttagacaggaaaaaaattggagtagaaaaatttgaagatgggttggtatccccctccttctannnnnnnnnnnnnnnnnnnnnnnnnnnnnnnnnnnnnnnnnnnnnnnnnnnnnnnnnnnnnnnnnnnnnnnnnnnnnnnnnnnnnnnnnnnnnnnnnnnnnnnnnnnnnnnnnnnnnnnnnnnnnnnnnnnnnnnnnnnnnnnnnnnnnnnnnnnnnnnnnnnnnnnnnnnnnnnnnnnnnnnnnnnnnnnnnnnnnnnnnnnnnnnnnnnnnnnnnnnnnnnnnnnnnnnnnnnnnnnnnnnnnnnnnnnnnnnnnnnnnnnnnnnnnnnnnnnnnnnnnnnnnnnnnnnnnnnnnnnnnnnnnnnnnnnnnnnnnnnnnnnnnnnnnnnnnnnnnnnnnnnnnnnnnnnnnnnnnnnnnnnnnnnnnnnnnnnnnnnnnnnnnnnnnnnnnnnnnnnnnnnnnnnnnnnnnnnnnnnnnnnnnnnnnnnnnnnnnnnnnnnnnnnnnnnnnnnnnnnnnnnnnnnnnnnnnnnnnnnnnnnnnnnnnnnnnnnnnnnnnnnnnnnnnnnnnnnnnnnnnnnnnnnnnnnnnnnnnnnnnnnnnnnnnnnnnnnnnnnnnnnnnnnnnnnnnnnnnnnnnnnnnnnnnnnnnnnnnnnnnnnnnnnnnnnnnnnnnnnnnnnnnnnnnnnnnnnnnnnnnnnnnnnnnnnnnnnnnnnnnnnnnnnnnnnnnnnnnnnnnnnnnnnnnnnnnnnnnnnnnnnnnnnnnnnnnnnnnnnnnnnnnnnnnnnnnnnnnnnnnnnnnnnnnnnnnnnnnnnnnnnnnnnnnnnnnnnnnnnnnnnnnnnnnnnnnnnnnnnnnnnnnnnnnnnnnnnnnnnnnnnnnnnnnnnnnnnnnnnnnnnnnnnnnnnnnnnnnnnnnnnnnnnnnnnnttccccaccctcaaccccacacccctggcagctgcacatttccactcatttacctataccactgggcttctctcctatctctgaccatacctgatcctgaccccctttttccctcccatctcctcttccacccaggttcctctcctcctctgcctcccatgattcccccccacttttgaatcagattgaagcatcctgaactgaactcctttgcaagagcagtaagtgctcttaacagtgaagctatttctccttccttcagtgatgacactggttattactcatgctttaggtgttggcatatatctctgctgcttctattgcctggcactctgttctctaggccctgcaactaccatttgtaattcattttcctcacatcttttaagtcttttacttaaagttcagagtggaaatatgtttctcatacaatttactttttttaaaaaaattatttatttattcactttacaggacaatatcagtacccccttctccttccaggacccccttacacagatcctctcctactcgtccctccccttcccctctgagaagggaatgtccccatatcaactctctaacttcccctcccccggctcattaagtcactgcaggactatgtcctctctcactgaggcccccaaggctggtttttgttgttgttttgctttttgtttttgtttttttttctagtcttcctggggcttattcttgaccagtcaatgcctgcccctcccccagtcccacctgcctgattccccttttttgatcacttccttctgatgtctctctgttcacttctctattcttactgttttcttcttgttagacttttgtggaccagtcacaaagtggcttgcagagaaacggcccctttgctgttttacaaaatcgtgagtcttgagaggtagcatggtgctgtcttctcttgctggttagttactagaattctcagagtagagggtgctatggagaaaaacattcttaatggagagcctgagatgctaatatggtggctgataaaatcaagactgtaaatgatatcaacagggtggaactaagtgctgaaagcaacaagatgaataaatgaaatctgacaggctgcctaaaaataatgtcccttaactatggactggggaagcctgccttggtccattttcagacccacacatcctgttctgggtttggctcatttgaaagctctccagtgctcgccatttaaaggtttcaattatactgaacgctgaaagagtcacacctggtgctcaggccaggcacccaaagccagcttgttcagctctgggcttattagctcagttccaaactatctaacagccgtattccctagtgtacaagcatcaccctccacttgggtgtttatagccatccttaaccctagactactcttattcctcacagaagaaaattaccacccacagacttttgtcttcctcataaaaattcctcaggagagctgtgtttgggggacaaggtatttttctctctgtcttgcatgtgtctgaacttcttctctttctgaatccagtgccttctgagtatctttgaaacggtcacaccatactgtgttgtgttatcttcctatgccttctccagtcctccgctccccacggattctctgcttcagcaggggaaggcgacaagactagccctcacctgcctagacagcttccccaaggccacgtctgtcacacacctgaagtctgagtcataaacagactcttcctttttttcttctgccctgtaatactttgctcccgtgtctttctagaacaatcacacttgtacatttgaaaaacttctcaagagctccatcataggcaaatctgtgaggacctgccagattctgaaaactgcagctttctgggctcccccagcactctcccatgacagcactaatgcacccccaattaaaactgcacagtgttccccacacttctatagacagtcacttcatggtcagtaaagcagctattcccaagttccttccctgagacccctctctccgtaacccctgtttagaccctttccttcccacgaacgacagtttttccttgactctggtttgaacacttccaacttacttgtctttgaccccctcacatatgatttgtttctgttgtgttgcatttcattctcacggtgacattttacaataataaggattgcatggctttattttaattttttcttacccttttcaaaaacattgaaataataattttaaaaagcactaccaaaatgctttgttcttatccatgtaatcaatatccatttgaaaaaaatctgaatttaggtaagtggttttgcataactatgggtagatatagagaattaatataagaaactaattttagtaaaaaaaaatgcatttgtttttactaccttgagaaaaaaatgactgagttactatcttgataaataatggctgagtgcatatacaagattaaaggtgttgctaattttgatatgtatttcttcatcacaagcagtcttgttgctcaattagcctcatacagctataatactgaatctgagaaagagatgaagttggcatccttttaactcctgccttacatttatgtgcatctgcagaaagtaaaagaattatcatatagaaatagcttcaatttccctaagtatcacttcccaattttagttattatattcactgcaaaattatgagattatatttcctttctgtaagtacaattagcagagtttgctaaatatgcttctatatgtaaatggatcctagactgctcaatagctgtcttttaatcctagttcacagttcactaagttccttagttgtcatacaaaacattgaaccataaaagtgttttgaaatcacaagtaattctattctcaatcccatataacaattgtgaatgttacaaattattttttaaacaaaacaatgtagatgctatttactgtatgtttaaatacacacagctgtaaattttctagtctgtctacctgttttgattgacataagttctatgtattgagttgatataatatataaatacaagtttcatcatatataatatctgactataaataattgtgctatatattttagtgtcaaaatctttgaaatacttgtatatgtatatacatttagaatatttactctcctaatatttaatttcagcaaaatgtataaaatagtatttagctatgtataactttcataaatcatcacttgcttttcataatcaatttttattacttacatcttagttcatttagatattgtattgtttatatagccagattatgctgttcacacccttactatttcatagtgatgccaatgtgacaatattgacaatcctgtggtgggcattctagcgtgtgtcatggattcctttcatgggacacatatcccataatagaactgctgactcatttgtatgggcctgtttaattttattagatattgccaaattactctctaatgtggttttgcaaatttacattgccaattactatgtatatgagtacacactgtttatcaacattttgaatatttgatgaattcacttttcaattttgaaaatctggtgggcaccacatgctattttctgactacattaattttttctttcctgatttccagtgaggctgagcatttctctaagtttatttctactgctgcttctatgctttttccattacagtttttctcttttgttcactggcatgcacactacatttatccattacctatgcacagaaactttctcctggtctatatcttgtatttcaatttctatacactgtattaggggatatttaatattaatatagtcaaccttataagctattccctttgaggtttgttctatttgtgtgttctttaaaaaatatcatccccaactccaagctatatcatttatttttaaaaattgtacagtattgatttttgcagaggtctttaatccatcttgctgctgttcgtgagaatatcattaaatgtatatggtcagatagttttaatatgactgcttattgaaaagcccatgatttcccttctgatctttccatttgattaaaaataacttacctttaaaattatttatatattcacaaatttgtggagatacagtgccgagaatccctctgcggctcttgcttgctttccctcccatctctttcattttatcagtgcatttgggacaagtgcagtgttaatctgacatgattaacaacgcttcatagttgtttagatttttcaggttttccccaaaggtgctcttcggtccagtcaaccacactttgccttggtctccctgggtactgatggtactgatagcctttctaacttcctttgtttttcatgaccttgaaagtcaggtggtcttgtttgtttgtttgtttgtttgttacattgttccttctggagttttgttacattgttcatgtttagatggagtgtgagtttagggaggaaggtaacaaaaaaggtccattctcaacccatcagtttaggatcatgtgttatggactgggcttatttaccattgatgctgttaactttgttcttttggctaaggcagtgtttgccaggttgttccaacatgtaattactttgtcctatttgttataccctaaatttttataatgagtcattatgttcagttttcctagagaactgagagcttccacttcacagaggtagtaaggtctatgtaatttatctagaattcttctttaaggatcattatcatttttttgttaatttacattcatatagactgacgaatattttattcttcaaagtaagaagctgcactttggtttcttcattcacagtcttttggctttggctattgagagctcctttgcttggctccaatgtccttttattctctttattcttcctgcatttccttgctttctggcactgtgagatctttgttctttgcccccaccttaatatcagtgatttcatcaaggagcttttatctatctttacacatggtactagatgagaagacacaggtactggctgtgcttgctgttactcaggtataagtactagtattgatctttcttagaaattagagctagggagtgtctgtgggtataataatgactcacaaaatatacctataatttctaaatacactcatttatgctgttattaaagcaacaatgaattcatactcttgtccccaactccaatcctataccacatgcaggatgtcgcttaacaaaaaatgaataaaaaaatatggtgcatttacacagtgggatataactcaactgttagaaaaatgaaatcatggaattcacccgtaaatgggtagaactagagagagaaaaaaaatcttcctgagtgaggtaacccagacccagaaatacaaatatgatatgcatttacttatatgtagatattgacagttagtcagtgataaccaatatataatccataagaccagggagattaggtatagagtaagggactgggagggactgatagatctcattaggaaagggaagtagaatagatatgtgttttgggggatgccactggacaatcaggtggagagagaagatgtgaacgagaaaaggaatatagggagagacagttaaaattcaggagcatttgaagggtagtatggaaacttaatatagtagtcctgaaatatattcgtatataaagacaatctaaatgaaattcccaaataatgggagagacagagccacaactagacatttcttaacaccatgaagcttctaatgctaggaatgggttgcatctaattgatttgttggccaaaggggtcccatgggaacccccaaacagcccaagttgttgcctagactaagggttgcttgccacaaactgagactaagaccccattgctgaaaacaacaaccacacaactcattgaacacagagaggtcaagctggtgcctacatagggccttcacccctatgttctagtgcctttgatacaggaaataatatgaatgctaacaaaagagaaatgtaaacaccaatccatccataaaccctgtgatctacaatgatgttctgtctacatgttgtgctaatgcagtggtggcacaaagcttgtgggaataatcaaccaatgtacatttgacttaaggcccacttcagaagatgcaatttatacttgacactgattaggtgaccaagagcctgtgtagatagctgagggacccagggtaaacccaaatactatgttctactaaaaacatagcaatgaaatgactcctagtaatattctgctctactcatagatagcccaggtacccagggtaaacccaaatactatgttctactaaaaacatagcaatgaaatgactcctagtaatattctgctctactcatagatagcccaggtacctagggtaaacccaaatactatgctctactaaaagaacgttcaatgaaatgactcctggtgatattctgctctacttatagatcagtgctttactcagccagcatcagagaagcttcctcctgcagtggataggaacaaatacagagacccacagctggataataagcagaaagtgcaaggccatggaacactcagctctagattagatggctctatcaattccctccctgcctcgatactcatagaatcctactgaagaggaggcagagggaatggaggagccaaaagagatggaaaatagtaagaaaatggggcctaataaatcaacagggtcaggacacatgggaacccaagagactgaggtagcatgcacagggcctgctcaggtctgcatcagatgggatcctggcactgaaatgggacaagtggataaatgctctcagtttctagtccagaacctatctccagttgatagacacttgcaaattaagatttgtttttctctgagggagtctccttggggaaacaagcttctctttggggtaggctacatatatagcagtggatggccatcagaaagtgaattcacagacatctttgggggtttcttgtctcttagtattgcatcagggctgttcttttttcttcattgtttgtcttatttccaattttataaaaaatttatttctatgtgtttagttttttttttctccttttcccctgagggccctttgaatgtgcgtgtgtgtgtgtgtgcgcgcgcgcatgtgtgtgtgtgtgtgtgtgtgtgtgtgtgtgtgtgtgtgtgtagtggctttcattttatggttttgatgggattcttgagtgtgtggatggctccctctgtggctgtatctgttgcttgagtcttttcttaggctcttttccttcctttgtttgttttccccaattctttagtttttgtttttcttattttatctaattattattcctgtttattttctaatgagagacaggagggtggttctagacatgagaggaggtgagcagaaactgaatggagtggaaggagaggaaaccaagatcagatataacctgtgagggggaaaaactattttcagaaagtggaaaaaataaatagttcttaaacactttatagactaccctggtaagactccttaggccaagtgttttctatgtgagagagtctaaaaacattggtctagtctctttaaacttgttggtctacccaactttcctatcttttcaggtcagattttatcaaagatcatcaatgccattcccaaatttgttcattgccagtgagcatgacaaactagtgttccaagggctgcaggatgaattttgtcacctctgctccttctaataagaaataaagaaaataagtttgttttcaggtatgtccaacatttcaacattatgtcacaatcttgtcacctctaaaatttacacttaactgtgcatcaaggtgcaaaagaatttgcatacacacaaacatctcacattttaagtcagtttaaaagtgttgatactggactgcactcaaagctaccctggggcctacatagcctgtgggatgcaagttgagcatacttgctagacattaaataatattttgtttattcttaccactgctgtgataagacatcttgagaaaagcaagttaaaggaaaaagttttgttgttgttttttaatcacagtctgcgaatgcagtctattttagtagggagttctatgggtaggagctgaagatgtatcaacagtcaggaaatagattgatgaatgctccactcagccctctgtcttcttgttactcattccagaatctcagcccatggaatagtgctgcccgtacttaggatgagtcttctgatctcaattatcttaatctaaaaagttctttacatgcctgcacataggctatcttaatctaaaccactcctcataggcatccccaaggtttgtctcttggataatactaaatcctatcaagtttacaatcaatattaaccatcacatgtaatgaaatttatattgtccacaaggtcacttatcaactcattgattagggacgattatccatactctatgctaaggattagagcactataacaatttttgtgaaagttcatttatattttctccatcagaccaaccctttaagaaattattctcttctaccaactgatcttagcactttttggactggaatatttcactgagagagagaaggagttaatcttatctctattgacacttagccctaaaaccatgattgaagataatcttcacttctgccactgaaattttattagtgtattttttctccacattcttgtaacagaccactcaaactttctagaaacacatatctctatttgtaagaaggggggggggaggaaaatctgctggaattgctatgtggctgagggtggggtgagctgggtttgaaggccactagcctggcctgttgccaggcaatggaatattatttaagtcttggttgcaaaaataggttgttttacttgaatcactaaggaaaactgagaaataaagtagaaagtgatcatgagggaaatgtagaatgtttttttacatccttagcaagtgagaagaggccacagaataaatgctgtctagctacacaccaccctcccttgggggagggggccacaaggcagacctttttggatgtttaaagaggatatatcagaaaggtaagactatggcacgttctaagtacctgttttccatgaacaccatgaccccttagaaccaggtactcagtctattcaagatgttctctgctgagatcctgtaggcatgctcagaagaggtctcagctttcgatatggtagggtaactgaggctctagtttcttctctaaacaacaatgagaagtcatatttatgtgtttcttctctcaccatgcaaaaaggaatctctgttgatacagaggtacagagaaatagtcaagaggagtgaatgtttatgtgaactacaagtagtggtgtgctggggctggctggtattgctgaatggcatcacagtgctaggctaaatattttggtagagtatttatactgagcttatcaggaaactacaattcaagattattttcttgcttatttttcaaaagtcatatgttgagcatatatctattacagaccatagaccataattgatgcacaccatttactttttactaaatgttttaccaactcagtgttctgtctcttttcccaattctgcatgatgagcaatatattattgccagttcactggagcagaaacagggtcttggaaggtgagaaatgtgttcactattacctggcagctctaggggatttgttcctaggctgatcctgaatctctcctttaattggcacattaccctttctgtttaatcaaagccttgcttgcaatctaccatcacccaagagaaaccagttcttaaagggcacatgtatcttcttgtccttatcaacccatactagttgatctctgatgctttgcttacctaaagagtactgtaggaaagagaatgggtcagattgctctcctcctacttaccattgccttttctttgccttggatttccaaaaacacacttttggatgaacttcttgggataaactgacatggattcaaggctgtctgagcatttgctgtgcatagatactggcttaggacttgttaggagggtgggtcagagtcctgtccttggaaaggcccacttttagacagcttgctggttaacaggagttcacagcagaaccgtgcagtgaggtgtcagatgtgtgggctgaaggcagcatggaggaagtaattatcctcagctgagccaagaacagagctgggtgtgacagaggtggaggtgtaagactaagaaaatgatggcaaatggggcatttcaggtaaagaggcagtccgtgccaggtgaaccaggagtagggctccagtggcatctggagaatcctcaggctgggaagaaaggagaaagactgtatccttgccctagaaattaacaaagtccaagtaacttgaaattttcgaatctgtctcattactttttttttcttaacctatttctcagaaatagatgaaaatacttatacttgcttcactgggcatatttgggttagaaaatttaaaaaatctcatatttacaaacgttggatgtcctcctttatagagagacactgtctgagaatccatccactcaatactcctttcctgacttcctggcttcagattattaggtggaaaactgggcaacagggaacccagagagataaacttgcatgttaggtcagatcaggtcccagagagactttaatatagaataaagaatgtctgtgataagtgacagaaaagttagttcttccttccttccttccttccttccttccttctttctttctttctttctttctttctttctttctttctttctttctttctttctctctctttctctttctttctttctttctttctttctttctttctttctttctttcttttccctccctccctccttcccttcctttctttttccatcaacagtcacacatttgagagatgagctttgcaaacaagcttcataaggtagctgcaggctcctaggataggcaggggtcaaggttctagtcttcaaccactcaagtggaggaaagcaagtagatggtatagggctagccagtgggaaaatctatagattgctaactcaaaagacttggatggaacctgggaaaagagtcacattcagggtatggcaaaggaaaatggagagccatagctatgagtggaggaaaggcctgggaagctcagatactgtgattgtccagggagcagttgtgggaaggatatataggttcaggggtgtaatctcgaggtgatgtcagaatcatcgggcaagggttaaaactatcccttctacaactctgaaaattactagcatcttgggcataataggagaatgttctgtccctagatgtgatgaggcattcacagctagaaagaacacaggtctaaatgtcaaatgaagtcatcagcagcctttgggagcctcttttcttttgctggttgtagattaccaacaataatgcatattcggaacctagatgaagctttctgtcctttaaacactgaataagacgtatgaggtacggtctatgtttataactaaccagagttgaaacagtgagggcatgttattactgaaaatgctaatgttgagttaaaagatgggggaagggaacagcccacagtggggatagtgggggtagaggcaagaatcagcaagaggaagacttagaggaggtagttgttttaaaatgatcaaatgacagggagtaaccagaagcagggcaaagaacaacggaaattgaagcaaggtccccaaggcaactagaggaactaaaattaaggtagatattaaggaagagaagcaaggcatataggtacagggaccactcaaagtgatgaggtttctccatgggcaattcatgggccaccaatttcagaagtcaagctttaggtacatctttgggtatggagcatgttcgaattttcctctgcccaggaaaattatagatttttggcataaataagaaaggcaaaatgaaccatagcttggagtgcaattctctctgaatatatttcaaggtagctagtggaggagaagtgagtacgttttagtcagcctttgaacatttcctgcaggacattaatgaggagatgtctttctctgctgctaccctggataaagtgttctcctgaggctctttgggcagcaggagggggttcctcttagcatgcagaaggaacctgagcctccttctcttctgagaggttcgtgaaaaggcttggggtggttcagttctggctagacagtgctcctcagttctgtttggccagcttagattcttgataaaggttcagtcagggagtgatagtcgtagaaactagaatcatcatgttttgaatgtcttagaggaaagtggtgacagcagtctcccgtgcttgcccgtttctctgcaggcactctctggtgcttcttgtctttcatttcaagatgtggctttgtcagtgtgctgctgtcatcctgtcactgtgagaagtgggttgtgttctcctttatgtcatcattcatcagactgctgtcacccactattgggtcttcgaacttcacttacttgaaatgttgtccatttcgcttacagctcataagtactacatccttgaaagtcagggtcagacccaagattcagtgctgttccacccacctgagattcctgaaaaaggttgagaggacagtataatggggtgcagattagactttgctaattgacaaatgagagtttgcatcttcttagcttcattgcctttggatcctaggtggaagcattaatcttctgcccagaaggttaatggacaaccacgtgagtgcctccagcttgtcataaggtcatcattaaagttgctccaccattttatccccctttcctccattctcaattactaacatgctgcaccctgccctccattcctcttagtagaaccacacagcggactcataccaatccccactctgctattctctggccaattcaggctgagcatgctgcccaaattggcatccttggtatgtgcatagccatcacacctgtacctggatctccattacaacttccctgggccagttccacctgccctcttgaacctgttgaatatattggcatgtggaatctcattttcaacgtagaatctggacctagaactgaggatgacattctgatgtgagggccaaattatctgacactgagtttctcagaagagatttctcatagagtccaaaccaatcagcatggtttaggaagtaggtgcagtccagaatgaggacctgaagagcagacttcttagatcatctgcaaacagccagtctggagtcgagtgttcttctaggcattatttattttattctttatccaaataggggagtgatggctctgaaaactctgtctgctattaactaatggcaagctcggtgagtaattgtacttgagtctgatgagcaagtgagattaattgtccttgctgacttgctcctgaggacttagggaagagcaggaaatgcaggcatgcaaagagctagtcctgtaaaaatgtggagctttatcaatcaagtcagacattctaagatgaatgagtgctttaggtgtgttcagtcctatgcattatataaagtttcctgaaactgaaactcctgagcattctagcatcatctgccatcccagggatggaggcttattgtggaaaccatgtcctcatgacagaagctgaaggcctttcattgctagctgggattcctccaaggatgggtgccaaggattcatgtataaattgtttactgggtagatagagaaagctcgagcaaaacaagttggggaaaattgagtaagacagaggaagagtgcagaaaaaaaaaagagcagaagagcacagtaaaaaagcacgctgtctagaagctgcatcagtatgatagtgggagggctctgaagtgctagttgtctcacatagttggccttgtcctcagctggaggccagggctgtcatatcacttcatgtccttccaccaatggctggggactgttacttgaagaagagatatattgatcttttctaagggtatcggctgtcttttgggaagctcttgcatattagtgaccaccactcacaagaaagatagacaagattttgcaaaaagggctccagaccaagcaccagtagtatcgattgtaggcctaactgatctctcttttatgagttaggacttaagttgtatctgtattctttgatgacaataaaatactccttaaagacctcttcctgtggcactatacagccagcatatataatgcaatctgatacataggtagggcagaaatccaaacttactagatggtctctgaccaagtccaggattctgaactggggtatggctgtacatctttaatttccattcagagcttcacaaggagttaccttcacacaaggtaaagggaaccctaacagtactgttgtatggttccctggaatgaactacttctagtggcctctgactttgccaaagtcaaacaatcaagcctgtcttttttacaaatgcccaaagatcacacctccatttttatctgtgtaggttaatatcatataagtctttgtagtctttttcatcgggagcccagtggtcactgaaaggacactgttcttcttatccctgaagtgtgaatattgggcttattgttttcatggtgatgctcttctgggctaagaaaaaaatgtgaagagtaatagagttcactcttcagctcacaaacattttaattaacttgctatgtcatgtcatcagacattgtccataaggaactagagacaagattggagattaaggaatctcccagatgacacacagactttcattgttgcaaacatctttccccaataaccaaatacttttcctggatctctgagtaagttcaaactcctgttgttgcatgttgccacagcctgagatcatcactgtcacctgggagaagctggtccaggtgggaaggaagaagggccaaagaaaacacttgctttgagacactccacgaggaattacttgacagctgcagtgcattccagccctgtctcagagccgcatagtctccaccctggagaaaacacgagtgttacatttcttccaggctttccaatagtatgaataatttctcaacaaatttcataggaatgggtttctcttttttttttttttcttggcagttttcctcaggccaaatgacacagagcagcagcatcaaggctgatggacagtctcttatctcctgtgaaacagctgtaaagccattgatagcgggatgcacatgaacccagaaatgagctctaaaaaataattttcaataagctccaatggaatatatcagcatgttagtcagactgattctctaaatgcctgagccccaggcccagggtttgtcctacatttatttcttcctaggataaaggacctagaatgtctttggttatgatttacactaataatgaatgagcttcccagtagcatactctggatatcttagaggcacataatttgtttgcctctatggatttattttttagaagttttaaaaactacaatgtttactttttaaatattgtataaacactttgtgtgtgtgtgtgtgtaaaagtcaaaggccaacttgtaggagtctctctctctctctctctttttttttcttctaccatatgagccctgagaatttgacttaggacatcaggcttctattcccactgcaccatctccctggccaaagattgttccatctacttttttgctaattgatatgagaaagattacatgttccctcaaaatactacctgttactttgcacagctcttaactgctaagagcctgtttcacatgaggataattaatcacaattgatttttatgactatcatctgatcagtccttgaaatctatgttatggttcctgggatagtctaaagtgcctccaaagagctatgacctatgatcttttctaatccaccattttctgaaattggactttataatttgtcttaaacttgaggttattcagtggaatttgctaatgctcttcacattgatttgatcatcttttaacacacatctcctgggtgcttggtctgcaggaggctttctgagggatgcctcctttgtagtggactgaatgagggagatgaaagctgcagcttaacaaagaggagagtggcctgacttatgacttgctatccttgggaaaagcaaaaggcaaaaggcagaaaagagccaaggaaaaggaccagttcacacatcccatggaaaaggtgatagaaggaagcaggaaggaagtcatcccagaaccgggaccagctcagctgttgcaggaaagggatactagaaagaaaatcaaatgaattttaataaaagttaagtttgaaatgcatttgtaagggagagtaatctgagtgaaatgcatatcttggaaaaatggagtaatctcataggactatgtcagaagactgacatagtagaggcttaagaggatcctacaatagcagagcacaaaaagaaactcaactgaaagacagcagtataactactgaaagcaacagtagaggatctgattgactacacatagcagatgaagagaaggaaaggacctttaaaggatccaggactccacttatggagcattaaagaccatggctggccatgtcttcatagatcatatggaagtaaggtagtaagctggttccagaagaatagggttgtgtgatgacatttagagagtgaaaactattcattttgacacttgggggtgttcttgccaagcccacaagagaaagattgtctgaggataaggcagaagtagtggtccctcagtaagaggatgggatgaagcagaggaggtggatgggtgacaaaatgagcaagcagagatgaaggagaaaaatgaaagagtgtcatccatttggggacctaggaaaggcagtttctaggggtggtctatggagcccatgaatctaccaagatggtagactccactggcagaagttgagggagatagctgccaatgaataggggctacaggcccttggagcttttagtgttttctctgttccttgtacttccagcaggctgtgtcagaatgttctttgtacttgctttgcctttgaaaccgtactgctgacccttgaattgtggccccttcttaagaagcagtatgcatggagttcattgtttaagatggaatagaatggacttgtgagcagtctatcgtggccttatctgtgacagtgagatcctcactatgatgcagtatttggtgctaaatttggggctctggtcatacagttttccagtatgctcatattagccgtgtttctctcagacagacaaggatggtgcaaattcaattgttttcttttaaagaactgtgcatcaaagcgaattccctaaatgtctttttttttccattttttattaggtatttagctcatttacatttccaatgctataccaaaagttcccctacccacccactcccactcccctacccacccactccccctttttggccctggcgagctcttgactctagctgcatatgcatcaaaagatggcctagtcggccatcactggaaagagaggcccattggacatgcaaactttatatgcccctaaatgtcttttttaaaattagaaaatatttctttagaaataggagagaaatataatccgatagactatgttggaaaactttttttcatcacattagaaaaaacccaactaccttttatatgatacagttttgtcaatattcctcattataggtcaaaccatagtagaatatgttatttgcaaaaaaagtagaaaatcagacaaagtgatctttccccatgctctccattcattgactgtccaggcattaggcttctgttcagagaagcaaacttggttgaaggaccttcctttttagcaatgtttcctcatggactagaagtgttgaggttgccatctgacaagggtgggctacaggaaagagctccagactcagatcattgtgggaaacggaagttcagtatcctcccttacatagtctgacctaaggattggggtagttaagacctctggagcaggacaagccatgaaaagcaagcaaggtggggactggagttggaggaggcagccattgatggaaagccataggagagggcgatagttgtggcaggtgaagccaggggcttccaaaggtgtgaaaaggcttggtatggatgcatttatatcttattttcccagccaacatgtccacgttgggaatcattcctctttagtgcccatcactacaactcctaaaggattctttagagtcctgcagattccaattgccctcctaaaaggtaccactaagtttcctgcagacagcaagtggatggtgaactattgtctttgaagtgctttgtgcagtgcatagcatgtggggctggagggactagttcagctacctctcaccaacctccccattcactctctttattgcacactttattgggttattagagaagctaagttcctaacattgggtggtggccatggaattgttaacagatatagaagccaagttgagcccagttaggattggtatgtttgcttagacatagagaggtcatttgaaaagctagatatatagtgtcaaggtattctaaacacaaataatgcttttctgacacatggcttcaccagttccaacatgccttccaggtaacaagagctgaattttttaacccatacttcactatcatgacttaatttctagactcaaagggaagatcaggagttgttaagaacatagtgatcatcaattctggatgctctgaataagaccaagcctgaatgactttttatgagtctatctttaagcagtgacaggttttgtagccatttctcggtcattctgcaaagtccttgaaatgtgagatcggattttggcatagtaattcattatgtgcccttagaaaatgtctgtcttttctggagttcattgtcttagcttttgaaatgaggggatgttacatacagtgttttaaccttgccctctcccttgaaaccttgggagctcctcaacagcttagctctaacttttaccctatatagtgctctcgggtagatagatagacagcctgctcagtgtgaaccatggagagacagcctgctcagtgtgaaccatggagagacagcctgctcagtgtgaaccatggagagacagcctgctcagtgtgaaccatggagagacagcctgctcagtgtgaaccatggagagacagcctgctcagtgtgaaccatggagagacagcctgctcagtgtgaaccatggagagacagcctgctcagtgtgaaccattgagacggcaggacagagccattttctgtggagtgtgacagctgagtcacaaagcagggccagcaacagaactcaactgagccatttgtcagtttatcctcgtgttacttgtagtactggaacactcagtatctttgtgagctgccttctatgtgccaggttctgtggttagtcctgggaacacattaggaaagaagctagacctatttcttcttgagcattagcaaagtatttagaagtatctgcgcaggagtcagattccctgagctcatacgagggagctgatacttaatggatgtgtaaaactgtgaatgttaattaaccttttgaaccccagattcctcttccgtagcttaagaataataataaaccacctaaaaattgctctgtaaacgcagtcacagtgctccatagatggcactcagcaatcccctcttatttgtcatttaaaaaaaatttaataatagactacttggggagaaagacagggagagaggtaggggagggagagagggggagaagaaaagagagagactgcaaaggaagatgatgctctttgtctagatgcttttcccagcttaggggtcacagtaggatgctatggaaggttgtcccagaagaatagcagatgagaattggcagacgtctccaatgttgggtataagtatggatttacactccaggtaaccgtgttgtcccaatgatggcccagggagccgaggacaggagtctatgcttatgctaccttcgtgctataaataagatccagttcttcatctttacttctctctcttgctgtgtcctgataattagcctccatattcctctgaactagggcagcagcactgatgttctcaggaaattgagatctgagaaacattgtggggtcattctgatcatgcctgttggggtatgacagatgagcagaaggctgaaatgagggacaggcaacccaggtgctgactccactgtctggttcaatggcaatacttggtgcagagggaagcagccagcttaagtaggtagacacaataagatccagtaggatctaatcggtgttagatgtcttgggtagagacccccaacagataataactcttaaggtactcgggataaactgatgctgaatccccctgttgtatctgaaatcaggacacactgtaggttcttggcatacttagctgctgaaactgatttattgatatcagtgaaattgacctacataagacaatgcaaacatgagcctctaaacacatgtaccatcctcccttgtcctgaaaactcatacaacctaattcttgcttctctttccaaggttcccaggatctaccctccgttgagataaaagactcttgactaggtagtcagaatcccattttacattttgctggtaaatgcgcagagctgagactgagaaaggcatccacacacacctcccaggagaactgttctaatatgatttcttcaggaaattctttccctaatatcccagttttctattgaaacagtatgagaaagggcatttagtcctgggttagaattctggctgagtcacactgatagaaccacagtaggcctcagattcatcacctgtaaaacatcactaccccacctttctcagtatgaagatgctccttagggtgagcctgtgtctcaataaagccttgcaaattgaatacatcactatccaaatgtttgtacatgttgctgttgctcagtgtatttagaaaaaaactgaagttatcatagagcacatctctagcttggtcaaaatttaaattcaacatgtattttctactgaagacatacccttttgtattattataaagtcaaaagcctgtaagatgaactactattgtaatgccacctggattctgaaaaatagtacagagtaaatatttaatatcagctactccacaggctctattaggagacacttatgaatgtgatgtctaatttgtatatgttcaatacaaatgcatgttttaaagaaatattgtcaacttatagttggatgaaaccctgtgagtatgtaggtccagcagattgctgtgtgtgtgcatgtattcattcatatgtgtatggtgtatgagagttgtgtgtgtgtacatagtaattgtgtgatatagctatgggctatcgataattgtttttatgtaactcatttgtttggatttggaatgtattttcctgaacctcagccgtgacctccagcactgagccatggccatccatccctcccaccctctccttagagcaattatagtggcaatgtgcctcccatcctgagatactctggagatgcatatttatgtacttccagtcatcacccccagagctcagattttcctgtccttggtgtcactttaattaatacactcccatgtgctaggtgacaaaattaggttgcaggggtggcaggcgtttatatcatgaaaggagagaaaaaggtgtttgtaccattttcctcctcaagctctgctattaatctctgcaatcaatacttctttatttttggctctagaagctggtgggggtagaatcagactgtcaagtcatgtaaggccacatctgcataagtaatagagatggttcgttactttcactctagatgaaaatacgtgtccctggccagatgtgacagggaccgtctctgtgattctcatgccaactttatgatatgtttgatttaggtaaaatgtctggaacctgctgggactaagttgttattaaacaccatctgcagttttcactttaattaatatcataagaattaggaccccatgctttcatgaccatgttaaccctttaagaatataataaggagaaagaaacagtgaaatgtaaacccagataattccttagagggtttaatctacatatgttgggcctcagaagtagctgatctctagtcagaggttgctgaggtgctttttgtggagaagaaactgcatagtaggtccaacaggaaagcagcctactgcagtatcagtatcagctacatcaatttccctgactctttaagggaactaatcagcaacaataacagtgcctctactaatggaatcattgtaatgacaacatcaaccataagtatcatttatttagggactgatattgtttagctgtatcatgaaatatagtatactttcaaatatgtatttatttacattatccttcactatccatagggaattagttccagctcttctgtccccagtggatatgaaaatccaagggcttttaatataaaattggatagtgttttgcatatgacctgcctatattcccttattattttaattatttctagattattcatgatcatacaggtaggtatatagtatattgtttagggaaaagtaacaagaaacatatctgtacatattcagcagaaacacatgttttccaaatatcatcaaactatagtgtgtatttgaagagagagggaggagagagagagaatatacacatatatgcattataattatgtgatataactgtgtgctacaactaactactttctaagaatgacatcatgtaatttctactacattgagctacccttgcagatgaggaagcagagatctagtctatgcatctggtatgagacagattcaaatgaaagcttgttgaatcaaagctgacacttttttaccaacatgaatcactccatgaaacccatttcagtaaagaagttgaaagaaacatctccaaccagagaggagacatactgcaccctcttgggtttcatttccccagaaggacatggtgtcttagcttctactatcaatgcctctgttacccctaagagttcatgactgtggttcttgacccttgtgagcttatccctcaacagagattcagctcattggatgggttccccatgtacagctgagattggctgggtctgcaaaaatgttccatctaaccacgtgcagtcacaaatcatgaacacattcagacagcacatgagataaaagatggaaacagattgtgaagtctgaactgaaaggttagtctaaaagtgatgatttttaagggaggaacattctggaagcaggcactgctatgcagaaatccatgctcatcctgatattggctacagtactacacacaagctgcttttcctttatagctttgctttattatagggaaatgtggatgtttgttcatgtctctttgggcttcatgagggcttacagaggcctcaacaaatgggtatccttcaaatagtgtacatcctcttgatagagacccttatatgtttgtatcagactactgtgcaaggagctgtgaaattgggactcttagtctggagttctctactgtggctctgccctgtggctctgctagatattaagaccatgcagttgttccatctgataaaattcctcttaaggcacatgtgctaaagtgaacttgagttggaaagtacactgggcattttagtctcctagagtgtaaatcttcacaagtcagtttgctcatctgttcaactgtctatgcatcaccctgtcactgaacatactcatgtggattgggatgatcactcttaagataatatcaacaacatcagcatataactgacttaatgactgtactgtgcatccttccatcatccatctatgcatcacccatacatttttataatacagagatcaattgatcttatgtagctgttgtgttatgtctggggataaaaagataaatgaggacataccttcttcatgaagtggaatttggcaattcagagccaaaattaggttacctaacacagtatagaaatactgctgtgatgagggatatctctatcattgccaaaatggggagggaatgtgtcaatcttctagtatagtcaaacaaaatagcattaaatgggtgctttggataatagcaatggattgttttatcattccagatgctggaaatctgaggttaagataatggtaggtcctgtctacaggctaggaggtatcatctgctcttcactgttcctatagcttcagatctttgctgaccacctttggtatcttttgatttatctatgaattgccccaaacttggctcatatttttaccttgttaattatgaaaatattatatatacatatacatatatatgtgtgtgtgtatttgtgtatacatataatatacatatacacatattctattatatattacatatatgcatggatattatatacacatgtattatatatacatatagattacataataaatgtatatatgatttaatatatgtatatttataatatatatgtgtatgtgtccaagccttcttttttaataagtttattagttatgtgttgtttgaacaagaatgagaatggccctacaggtccctatatttgaatacttggtcctcagttggtagagctgtttgggaagaattttgaagtctggccttgttggaggaactgcgctacagagaaggcaggtcattgtgtcttattacagcagtagaaaagtcattaagacaagttgtattgaagtagggcacacccagtgatctcttttagcctatctacatgtaaggtcttgataggaggtcaggacatcactgttaaattcagtccaacctgtaactcagaagggattttcttcagtggaagcatagaggtagaggtagtgaaatgcacccaaatcttacaatatgtggcgctgactgcatgcttaggaagatatggtcctgttggcttatggaagagaccagaggagacagctgtgctcttaggaggaaaatcagtcaaaccagaggacaaagtataaaataatggtggatgactatgtgagacaagtcctgtgtggaaaacaaaaaagttatacatgggtgggtcacttcacctgactgcagtggggagccacaaagtgtttacagtaagtaccacagtcaaaatcggctcacagaacatcttgtctctgctgtataacaggaccctgtatccccttcagcagggtgcagactgatctgtcagacacatttatgcctccccaaatgctgattagagtgaagttctgacatgggggagcctgcttgtgtttggaagatggagcctgggtcagcatgggattgactcagtggactgggtagaaggaagacaggcaaggatgggatacagtggacaggcttataaagaagccaactcccatgtaatggtcctgcttgcccctgcactgctcacccctgccttttgctgttgttgttcactgtatctgtgttcaccttgcccatgaagccaacctatctgagtccccttcttctcagggctttcctgaagccaacagcactgaatttcttcctacttttcttctctacccattttacccaatctaagaaatgtatggttcaaaatgcctatgcactgatctctaagtacccctgtttttgtttttgtatttaactaaagtatctagaataggaaagaaataacaggttgtacaatagaaccatggctcatctctcattcatccactcaaacatatcagaattaaaggcttgcttgataatccttgggatgcacaagtccagatccacatacaacctgaccctggtacttctgggaagcccaggaagcatgggagatagcatctgtcccattttacatagatgtccaatgtctggaagagaaggaagagaaggaattctccaaatccttgcctctaggagacagtgattctcggggggcgggggggggaatgcagagaagaccatctttgaataacacagacctatgtggatttccagaagactcatatcctccttgaagaatgacaggcagcttccaccagaaaggaaactcctctgaaggttggagaaagaattagcttagctctagctctgtggcttgtttttgtccgtacattattttccatcccatgaaaccatgagagaacattctgctgccaagtgagggaagtctgcagccccccccccccccgagcttatgcctttggaagtgtgaatttgctttgcttcctcaagtgtcacgtggctatggtctgcttgtcacttggggaggagctcacaggcctcttcttctggagaatcgctgccagtgccctgcacgggcaatgctcccagtgtctggataagctgagttttaattgttccaaagtctgtttgtgatatcctccctatggtacgtctgagtctcaacagacaacaaaatgtgattccagttttcagagaaaaacaccattttcagagaaaacagtccatggtcctgctttgtgggaagaaagaatcctaaacaagataagatgtttttcatttcagcgcatgctacaggatgatagaatatcacagcaggggaagagctggtgatcatcttgtccagtggcttctcctgccaatgttcatagggccagacaaagaatgtaaatgttgtctgcaagcaaaggaagcgctggacttgtaagtgcacagaaatcataagccattaaaaacatccaatttgaaacaagcacacactgttccaggcagtcaatgacttctgagcctgccatacaccctgaccacttagaaccactctagagcccaatctctcatttgctactcaggataactgacagccacagcagcagctaacactcatggaatgttcccagggttttgcctggattcacccaacccatgaatatccatgttctgccaacaaggatactaatatagaaaaaggccacaggagaggcacaatttgttcaaggccacagagtttataagtggaaaattgatatccctgaccacaacctgtcatcactgcctatattctgagtacccatcttgtgctaccatcctgtcagggcaccccttggatcactgatgtgctatgctccctgggcaaggtaccaggctctcaggaagggaacatttgaactggcatatgatgctctcctaatttcctcctatttgtcaagaggataccagaccagactagtttccatactcagcttactgtcctgagtgaactggtacaagctaggggctgatactggaggcttttgataactcccagaattcctaggggactgcaacattatgggagggtagatttgatgcccacaaatgcctgtgcccttctaggcattttgccaacagtttttctgtggtgctttctataattctgtagctaggtgctttattcccttcaggcggtctactgatggtcactggcacacttcctgtcattggctggaaagaatgccaggctgaggcttatggaacccgtggatctactgggataatgtggcttgcacttgacattactaatgtttccacaagaaccttcttccccataaaatcatctatgactgaacggtccatggcttggacgtcattcctagctggagctgggtaaggttgatcattcatgcaccttttacatgcagacttgagaaggcttggcgttatgtttaccagcaagctcacctagatcgtcatatgggtcagctctcaaaccttattggtgaggagagaaactacctagtcagaaaagagggtactggagatgaattagccagttgttataagaacatttgttttaatatccggctccttacatcctctgaaccaagtgaggcctatcatatcctgtgtcttgcatattccttttctgactctgccactggactcaatatccttgttcaggtaacttcctttttccttcaaactgattcaggatgggttaccgtctgtggctttatatttaattgtagctgggtttgcattgttggataacagcctcccatgagctagtattttccttcaggctttgctacaaggaaagacctttgtttgttttcttatatcatggatgctgactgccaagacccatatagtttataaacaaacctaagacttctgagcagttgtcttggctctgtctggcttagatgtgatttggccttctgtggagttcccatcctggcactgtgtctcctttgttttgaagtttctcataacaaatagcatccttcaagccaagtgttcaggtcctccaacagttccttccttggaaatttctttctcattcctatcctggtatccttaagtatattctgatacctacacacacttagactttaacttgtatacctgtatgcactacgcatgtgcaagtacatacttagtgttattcaacagttgtgttctaatgtgcatatgaccctttttgcttttatagcctgcccctatccagcgtataggacaagccacccactcacctctctgttctgtgaccctctaattgtctaagtggcattgatacctcatcatttttccattatccctgtgtatctgcagttctattataactatcttctaagcattttatggacaattgtcgcctctggatcctggggttaatgttccttcattgtttaccatttctattcttcttagtaaaccattagcggttcttagactattttaccctcacagatatccatgatttgtaaatgctggtacctcagtgtggaacattttcaatgactctcttctatgtgtcaagtcctctttttctttgagttgtaaaaccttggtctttcctttcccactaaccttctctctttgccccaatctctaatgctttgccttctcccaagttagaatcagttcaatattatattccctctagactgtcattaatcctagtagtacattgtgcatgatgttctctggtgtctgagtgcttcctcttcactctccctacttagctcaggctacttggtatctatcaccgcttgacggggctggagcatacagatttttttcatcaagcaatcttgagtttgaagacagctccttgactttttacctccaccagttccttgatgtctctggacctctgcctctttatctgtaaaatagggagtgggatgtaataataacctttttgaaagagcttctgccaaggctaaatgaagcaatatgaatgaagtgttagtgtcttggagttgctgtcattatatgacaggaaagcaggtaagcagaggggcacagatatctgtaaagaaggagatgagggctagaacccagaaggagcagaggagacaaagggtattgccctggagtggatgaagagtcctggtgtgccaggtggctgggggtgggtgacatcttcatcacctcctgggagggtagcttctcttatttgcatttcagccacatttatgacaggctcataatgaattaagagccccagcactgatatattaaaggtcaatggctcatcctgcttttgcattgatttgtggcagcaaacatttgtgggtgttaataactgggagccagccatgttcttggcatggaggcatttgatggcactgccaaggatactgtgcagggctcccactgtgtggcagggacaaaagaggcagcaaagtagacagcagctgcatctcagaaattcagctgatggagtctgacttctactgaatccatgagaaaactggatcttgaagctttaacactggacattaccgctgggaagaagtggagatggcgatctggatggagagtactctgtgctaagccccaagctccaagaccacagttcttcaactcaagcatccacaatggagacttttttacaacaacaacaacaacctgtcagttcagacattttaaaagcatgacaaagctaacttgtatgcatgtgtgtatgcgtgtgtgtgtgtgtgtgtgagcatgcgggcccatgcgtgtgggggtgagtgggggtgtgtgcctgctgtgtccattagtatctaccatatgccaaaggaatactggacaaattatacaaataagggacaattatacaataagggtcaaatttgcctagaattttcctgggttttgctctgaaactcatcaatatgtgagattccctcagtcctaaacaaatgcagatagcatataacctaaagtatagatactggtgatataaagcaaacagctagatcttattcttagagcgaaactggcatcaaacacctatgtaacagggtggaatatatgtatttttactatatacattaagggatagatattttatacatggtagtcagcagaggccttgtaaagacagtgacatttatcagggattcagtacatacaagaacaacatttggctgagaaggaaaagcgagaggatgagcaggctcaatctaggtttaggggtttgtattttaagtgtttgactgtttggtctggaaacatattagtcaactaaatggagttgtcacttggatgattttgaggagcctgtagagcaaattagggcttaatggttcactgggagtccagagtgtagagatgtgtctccagctaatggacatgagattctggccaaagtttgtcaccagagaagaagggatctgacactccagttccagaaaagaaaactctaggactaaaactgtgaaaatacccatgactccagccacatatgtagcagaggatggtcttatgggacatcaaagagaggagaagcccttggtcctatgaaggcttgatgctccagtgtaagggaatgccaggacagggaagcaggagtgggtgggttgttgagcagggggaggagggatgggatgggggagttagaagggaaacaaggaaaggggataacatttgaaatgtaaataaagaaaacatctaatttaaaaaaaaaaactaagaaaagtcatgaataaggaggttcctgcatgatttttatgagacccaaggaaagaagtgctctggaaggagagagcaatcatttgtcaaatactgctgatgtgggaaaaagtggggactacatagatggaaggtcattaatgaccttgagaaaaacagcttttgcttagtggttagccaggtgagtgagtcaggagcataagaaatgggagagagtgatggaaatgacaggcacagataactctttccaggaactggatgggagtttgggatgaaatgcagtatcaaagattgtttaaagatagaagatatatgtgttttcaagcccatggaaatggcccatataaagaagtaatttcataatataagagacaaggggtgataactggaagagcaatgtgctttgagaatgcagacaactcctatatgcaggagacaaaccaatatacttaataggagcgagagcagaggtgccagcttataaagaaatcaggtggatatgcagtggttttagaaaatctgagttttttagtaaaaccaaattctttttttttttttaatgtttctgccccaccagttccagattcatttcaacttcatgagaaatattttatagcttttagagttgttttcaaactatgcaggctgcctcagcagagaaaaacagctcagcaagtatgtgtcaatagcagcaggttagcccactggccagatgttttagagagtggtgggcatgataagacagctggagaaagggaggatatgctaatgtgtcacttttattttttttaatatttttattacatattttcttcaattacatttccaatgctatcacaaaagtcccccataacctcacccccacttccctacccacccattcccattttttggccctgacgttcccctgtactggggcatataaagttagcgtgtccaatgggcctctctttccagtgatggccgactaggccatcttttgatacatatgcagctagagtcaggagctccggggtactggttagctcataatgttgttccacctatagggttgcagatccctttagctccttgggtactttctctagctcctccattgggagccctgtgatccatccaatagctgactgtgagcatccacttctgtgtttgctaggccccggcatagtctcacaagagacagctacatctgggtcctttcgataaaatcttgctagtgtatgcaatggtgtcagcgtttggaagctgattatggggtggatccctggatatggcagtctctagatggtccatcctttcgtctcagctccaaactttgtctctgtaactccttccatgggtgttttgttccaaattctaaggaggggcatagggtccacacttcagtcttcattcttcttgagtttcatgtgtttagcaaattgtatcttatatcttgggtatcctaggttttgggctaatatccacttatcagtgagtacatattgtgtgagttcctttgtgaatgtgttacctcactcatgatgatgccctccaggtccatccatttggctaggaatttcataaatccattctttttaatagctgagtagtactccattgtgtaaatgtaccaccttttctgtatccattcctctgttgaggggcatctgggttctttccagcttctggctattataaataaggctgctatgaacatagtggagcatgtgtccttcttaccggttgggacatcttctggatatatgcccaggagaggtattgctggatcctccggtagtactatgtccaattttctgaggaactgccagactgatttccagagtggttgtacaagcctgcaatcccaccaacaatggaggagtgttcctctttttccatatcctccccagcatctgctgtcacctgaatttttgatcttagccattctgactggtgtgaggtggaatctcagggttgttttgatttgcatttccctgatgattaaggatgttgaacattttttcaggtgcttctctgtcattcggtattcctcaggtgagaattatttgttcagttctgagccccattttttaatggggttatttgattttctgaagtccaccttcttgagttctttatatattttggatattagtcccttatctgatttaggataggtaaagatcctttcccaatctgttggtggtctttttgttttattgacagtgtcttttgccttgcagaagctttggagtttcatgaggtcccatttgtcaattcttgatcttacagcacaagccattgctgttctattcaggaatttttcccctgtgcccatatcttcaaggcttttccccactttctcctctataagtttcagtgtctctggttttatgtgaagttccttgatccacttagatttgaccttagtacaaggagataggtatggatcgattcgcattcttctacatgataacaaccagttgtgccagcgtaaaaccaaattcttttttttttttttttttttaaaaccaaattcttaactgatggctttggctttcttggggaataataagctgtgttttctgagagccatccaagagactgggaaaattgattgtacagagaaatatagaagcttgcccagcagcatcaagggtccactggaagtctgtgaggttagtggttttaagttagacccattagcatactagcttccattagcatactagcttggatttttctctagctacattcagcctttgagcttcaagcacaggatatggttaaaccagaactggttcctttacttctgtctatcatagcatatatggggcaatatagtccatgcacaaggggactcacagttgagtcaggaacacaggatacatgaggtacaaggtcagtgtcaggacaaggctcagcctagagcgcagagtgacatggatcctgtgaatatggactagcccttcttccttccttccttccttccttccttccttccttccttccttcctatctccctccctccctatctcccttccatttttacatgtttacgtataaagagtgtacatgcttatatgtatgcatatttacatatgtgtctgtatatgtgtgagagtattatgagtatgtgcttgcatgtggaggcctaaagttgatgtctgatattttccttggtcactctctacagcatatgataaaaggcaaggtttatgaattgaaccctgggcccaccaatctgctaacctagctagtcaggttgctccaggtatgcgctgtctttgtttcccacatgttgggataataagaagttcaccatacctacgcagcatttatgggtagggcctttggtcagtagaaagtgctttggctgagccatctccttgactccaggacccattctttttataagatgtgacagttgagatttcttgggtacagcttagcaggcaatgtgtctgaatgcagacctgaagacatgagtgaataggggtccttcatgatcgtcctccatgatcatagcatctgtgaagaggctagtgggtgggtaggggagcagaaactctagttacataaggcatgagtcttctccactgaggaccacggaggcctgcagacttgaccttgtggaaaatgagagtgtggcatgcatgcagcccttctgctctcccttggctcattttcagagcttctatcactgagccctatcacttccagggaccaggcctggattaaacctagttgaatgatgtagaggtgaaggatatgctagcctgcctggtggtataggaattttatccctgagccctgggttggggagactggccttgaaaattttaggtatgtctggttcttgggagattcagctatgcgagtcagtctattccaccatagcctgcagagtagatattggatgggggcaccaggggagggaggctcctctttgaaatgggtcttagctgacaagtagtcctaccctaccagtaaagaaaggggatatggaaaagagagcacaaagctaagttcccagagtccagaactctatttgcatatctgagggattttaaaatcattcaggtcacattttacatataattcaaatgcaaattttgcaggaatacatttgttagaactggaagtcttggaagtggtctctgtttatctctctttgttttggtgtttatttatgatttttttgttaaaggtggaattagatactgtttcctaatgttgaaaggtatttttcttgtttctgaataatcacacaatatagtggtctcctctgatctgagagatactcaccaagacacaatatggatgcgtataaaaatggtgctaaagtttatttcaccattttatcaaaactgctatatgctatataaattaggtataataaaatactaaaacaataagataattataaaatatatcctaatagtatcatttaaaacataaattatttatatttcatttaatatatgaagaatgtgttaaaccgagttttgtactgttgtttgtgtttgtctgtttttccagttttttaagcttgtcatggacttcatcctgtggtgggccctgcttcattcccaggacagttttgctggtctggggttgccactgtgctcactgcatagaactgtgccatgagtaggctttgtatgcgaagaacctgcctgtgtctcattgtcttccaggcttgctagatggtctaggggaaaagtctctggagtaagagaaactgagaggcagcctctgcagccacactgcctcttcccctgaaggacagatgctgctggtctcagtccagccttccatgaacctatgccctctaaatcatctttgtctgatgctagcaaagagagagaaacatgtgcctaaatgccaaagctgatgttgataacaatgtctggcttctttatataattatcttctccattccttttcataaactgtatcatgctttgctatctccccagcaatatcttcatcagaggctgccaaccatggcctccgatctgaattgtgtttacatacacagtggctttttaaatctttaacttttaaaatgctttttaaagtattggagaaaacaaaagcatactaaaacaaacaaacacaaacaaaaaaagtcatgtgaaaagagtttcacaggaacacagagcccataataagagtttctgttttcagactccagcattgcataactgttggtgcccctttctctctctccaatcttaacatgacatgaagatgtcatgaaaccaagacctctgtgttattcttactctatccctaaacctttagcagggcctcatacagtcagattctcaaaaatagggcatattaaaacacatgaaactcaagaagaacgaagaccaaagtgtggacactttgctccttcttagaattgggaacaaaacacccatggaaggagttaaagagacaaagtttggagctgagacaaaaggatggaccatctagagactgccatatccagggatccatcccataatcagcttccaaatgctgacaccattgcatacactagcaagattttgctgaaaggaccctgatatagctgtctcttgtgagactaggccggggcctagcaaacacataagtagatgctcacagtcagctattggatggagcacagcgcccccaatggaggaactagagaaagtatccaaggagccaaagagatctgcaaccctgtaggtgcaacaacattatgaactaaccagtaccccggagctcttgactctagctgcatatgtatcaaaagatggcctagttggccatcactggaaagagaggcccattggacatgcaaaatttatatgccccagtacaggggaacgccagggccaaaaagtgggagtgtcgggggaagatggtgggggagggtatggggacttttgggatagcattggaaatataaatgaggaaaatacctaataaaaaatataaaaaattagggcatactgaatgttgactgaatgaaaaaggatgacccttaagaagccttgccctgaatggaagaggcacagagaaaaggatacaagagaattctgagaagtggagaaaaggacagagggtgtgtgtgtgtgtgtgtgtgtgtgtgtgtgtgtgtgtgtgtacaagttctcaagcagaaagtggaaggataaccaggaagctgtgcttcttgtgtgcagcatcttcctgggtagattcagacataagtcagaaacatgagagtgtcagaatgatagcaggcacatatacacactgtagtaaagactttcatttatgaactatgtatgcccaccatccttcatgtataggattccccattgctttcctttaggaagaataagaaaaataatagtccgtctaggattagattagtcagatctagaatacggcagtcctatggttgtgaaatctgttttacatatactgtatattgattctacatgttgcaactgtatttatctccatttccaatgtaaatatttctgttaacatgcaaagatgtgtttataaattctgtatcattgatttttttcccatgctgcaaacacgttcatctctttgttaatgaaaacgtatctagaagtaggaagattgatttataggtcaaggtgtggggaggaagtgaagtgacagtcagctggggagactgtccttggctgtgactgaagggacactatgcagtttcaaagaggttagtttgtggatggaggaaacttctctcagagctgagcgcagcttgcagagccctagctgcaagactgtttgagatgctcatggccatcagttatgatttccaacggaaaagcccctgaatcagtagttcaggatgtgagatacagaaaaccagctcaagaaaggcttttagtagaggcatagaatggaacattttggctcaagtataaacttggagaagagagtgggcttagttatgggaggattctaacactagatgttgtccaaaaaaaagagacaggcagaggggatggagttctcaaaatgaacacgcttttactgtgccgctgattaagagcaaaggatccaagggatgatgcctgtgatggtttggatatgcatgatcttacacgcgttcgcgaccggccaggaagaacgcaacaaaccggaatcttctgcggcaaagctttattgcttacatcttcaggagccagagagcaaaagccagagcaagagagcaagagcaagagctctattgcttacatctttaggagccagagcgcaagagagcaagagagagaatggcgaaaccccgtcccttttaaggagaattatcctctgcctaggacgtgtcgctccctgattggctgcagcccatcggccgagttgtcgtcacggggaaggcagagcacatggagtggagaactacccttggcacatgcgcagattatttgtttaccacttagaacacaggatgtcagcgccatcttgcaacggcgaatgtgagggcggcttcccacagcatgacccagggagtgacactattaggaggtgtggccttatctgagtaggtgtggctttgttggaggaagtgtgtcactgtgagggtgggcttggagaccctcctcctagctgtctggtaatagtcttctcctagaagtcttggcatcaacatgtagaactctcagctcctccagtgccatgtctgcctggatgctgccatgctccagctttggtgataatggactgaacctctgaacctgtaagccagccccaattaaatgttgtcctttataagagttgccttggtcatggtctcttttcgaagcaataaaaccctaattaagacaatgtctcagaagccatttgtcccaatcccttgccctgtgctttctacttttctaggatggtctttttgaaggggaagccattttgctcacaaagcaaattggagttctggtgtctccatgtctatgttcagatttgtcctagaccatcccgtttggtaccatggaaacctgaattaggtagtattgataaggtgacagtttaagtgttgatagggaggatttgcctgtactttggtggagaggtagaaataaattggcgtataggctgttttccttggaagatagatttaggaatgaagagataggctttgattatgcgatcctgaaagatgatgtatgcttcctacccatgctttcttccatgcagtgtgacaactactgagtattgatttaaagcattaaagataacctcagaggctccaaaatgtgtcagtgttaagaaaagaaaattttagcatttgtctttggattattttgatggagagcaagctaaagctcaaattctctacttttctccatgtctttttcatttgtctatagtttgtagtaacttgtttgtctgtagtctatgtctgaggtgtgaattctgtctgcccctattgcctgtgtgtctaacaaaagtcactgctttggatctattgagcaacacatacagcatcacattgggaggaaatgagggatactttatagaaaagtttaatagagttttgtaagagattaagtagcatgcagctaaccaatagtactacaaacattatgctctcaagcaatgtctatataccattttaaatatttatggtgggtaattattgtataaggttactcttgactattaactattttcttcaaatgcttaccctttcccctcccacatgcacacatgtactactctaaattagaggcctggaagagtgtgtaatttgaaattaaagctctgtattagtttagtttgcatcacctgattacatgcaaaatctaagacaagtaaggttggtcattacattgttctcttaaagacatgttaaacaaagaaactgtgcatactgcaggatatcaagcaaagtattaagtgacctcaaggtatatcattgactccactgtgaggtcagcaaatgctccaggctttaatgtaaactgtattagcataccaccctccactccactagatggccaccatgattcaaacactggggctacttgttaagagtctgacagaagagcagacactgaacattgactatgagctggatgtgtgcctgtggtcattaatattcaccaaccctgtgaaacagggatgacttataaaggctaagacctcagatattaaatgtattgccttggtcagtgtttctagaacctaatttattagagtcacttggaaagctatgaaagcacagaagcctagcaccagcccaagagtttctgaattgttagagctggggtcagggtcaggaatttgcatctctcatcatgccaagggaactgctgagactccagttctgaggcgcacatgaaggctgagggagtaccttagatgactgggattttctgagacagtatcacatccagatctgccagctttccaaagttcaggcaacctgtaatgtgcagcccacatgacctgtgttttctcacccatcagggcctggatagataacttcttctcttcctagaatgtcctatgcatcagttcttgcttggcttccttcacccgggcttcatgattcagccaaatgcttctttaggaaacccttttggctcccaatttagggcttctcccctggatgttcaggggtcccccatgtggaactgtattttgctcccacatacattatttgcacagtgccgggtttgttttgttttgctttgttttgttttttgatgctcatttcttttttgttttctctccagccattcatttatatcttgttgtaaacttccaatagattgtcactattcatctcttgctttaggtgtcacagctcatggcctatgagacatctagaaatggtttgggataatagctggttcagttattttatcgaggtgcatgttacacactggactgacagatgtccaagctgagatgaatgggtttgccctccatttgttttataaagtaagtgcgtggacgattgtagtcactttttgctgaaaagaaaaggtaaattgtatgtactgcaagtgtagtccactcttgatgaaactcctttcctctttttgatggggttcctatctatcctcagcatctgtcttttgttgattgccaaggctggcttggcagcctcgttgactggctgtccttagtccccattatatttccctgtgagttatttctaaaactctgagttctgacaaaagggaaactacccatggagatgatagttttttggggtgtccttaggtgagcccacctcttccagtccttttataggcttagatactcagaaccatgatggttggacctattgtgtgacagtcatggaaatgaccctgggattctctgctgagaaggtatacatctgtaattagagagatctctgtatagaaatctatggctataggaggtagtagacctccatggtcagatgatgaagcttccctgggtgaaggtgatgtttgaggaagatggaacaataagctctgctgggacagaaagggagatagagccattaacattcagactgcctgcttgtcatccatgatgttctctgagcctctggccaggaacaccatcatgaataaatactcaggagagagaaatctccatttcaaatgtggggataaaacaggagatcagagctccctggaagttatgcattcgttccatactcatagaaactgcagtaatttagagtagttcagtatttagactcaactgtgtaattcatcctgatgtttcccattcatcaaagcttgtatttgtttgtattaccatgagaagaataaaaaaaatatgtaggaaaaagaagatttcccctcctttcattccaggcgatttatagctgagttacaacccttggggcccgtcaagcaaaggaacatcttgcttcaattaggtataaataatgaacaataattaggaagatttcttcatcaaatttgttattttatgttttctttcatctgcaatgtgtggaaatgaatcctgagctccattacttgggcaaatagcaaggaacaagggaatgctattgaaagcaacaccacagcagaagagagcaaccatacacttccgggccttgctgtgcaggctgtccagctctgggcccagggccatggagtagggatggagcagcttcagctccaggtctccaaattcttacatctggtgggatcccatgtatataatgtcagctcggaatagtgacctccagctcttaggtactgaccccaacaggtaatgttctttggcctgtgcaacaatcctaacttaatcttcagttggaacacactgctacaggctctgcttctagcccacatcttaagatttggagagtgaggtataaggacatttgtgaacttgtccattctattagggacagtaaggactaaaaacaagagagtagctggactccagagccactacttttctttactaaggaatgctgctctttgaaataccagtgagatggtgcagctatgatagccttcaagctatggagagacaccatagtgagacatagtctgaggatggttttgcagctagatttgcagaacatgcaggtacatgagtgagatgaaaggattccaggcaaagggagaggcatagcctcgtagcttagatgagaatgggtggtaatttttacttttaggttggcaatggttagggaaaaccactggagatggagagaaggagaagttgtatagatgaacctggcaagattggttggtgtactggttagttttttgtcaacatgacacaatttaggaagatttggaaaggcaggcattcaactaagagaacactccaatcagattgtttgaaggtaggacactgggaaattttcttgataaaagattgatgtggaagggttcagtccactagagctcattccactcagggcaggcagtcttgggttgtataaaaatatacaatccatggggagcaagttagtaagcagtgttctcccatggtttctgttaggtttctacctccaggttcctgccctgactcttcttcatgttagacttaaagctatactatggagtgaactcattcctttacaactcccttttgctttgtttgtgttgtttattacatcaaaagaaaagcaaaccaagatagttgggttggtttttcctatggaagacacatcaggaggtactgagactttcagaagagaaacaaagagcaatctcgccagacgctggaatgaaaacctaggttcccattaaggatttttaattttgaaaattggcctggaatatgtcaatgtatgtcatatgccatgatgggcattccttttcaagtagcaaataagagcacagtactatttcatccttcctgccttcactacagagggctcctgacttcactgtgtctcaactgaagagtctttgatagtctaatggtgtgaaaaataacaagcactagaaactgaattttgaatgttgagtttggatctcttcccaggctagtgatgtgtggaaaaattctctcttgtgggtttggttggcagcagagactggattgccaactgggccatgtgatactggggtaaaaagtgacccactataaaacagtcatggcattccatgtgtgataacataagtgatataggcatagtacactaaggaaggtgcagaaagggtgttttcaatgtagtggcattttcagttcaagatgaacccatagtgccatgcaaagcagaaagtcgggaagtatatgcatctccctttccagaaagaagccttctctaaccctagcttaggtagcaaccaagggttggttgctgaggggttccctgagatactctggccttctaacatctgtcttgatggagctacttgcttcttttcttggtaaaaatgaatctagaccatcacaagtattgatcctttatcatcagtatcttctaaatccctttctatgaaagacaaacaaacaaacaaaacaaaacaaaaacaaaacaaaacaaaataccccaggagatccatgtaaaaacacagttttcattactttttcaaaaattaacttggttggtagatactctgtgtcattaattggctggaattccagcacatctgcaagttttagaggggatgactcttaattgactcagcatcatagtgaatgtctgtgccacactaaccccaagtgttggggctagtcatcatctttgtcatccatcttgcctgctcagcgttaggatgctcggggcagaagctgtcagtaattgttgttttgtgttgccctgactctgttatattgtcatttcctgccttgattcatatttttataggtggattccaagctcactaatagcagagtcatttcttacttattgttttatactttgagctcaacacggaacctagttttatatgtttcatattgaggaaatctatctgtgacatatggaggtctggctccaggctgagggattgatgcatttgtacattgactttgatggatgtggataatgggttagtacagagcctggaactcagaaggaggttgcagcccattttatccttataatgtgtactatgcagtaattgctaacatttaattttactgcctttctgcctttcaggacatttcaggacctgtccaagcaactggagatgtcttatggcactgtccgggactctgctgtctatgagtacttcagagccaaggggaccaatcccctggagcaggatagcacttttgctgagctctggcggaccataagcaagaatggaggggctgacaactgtgtgtccaatccttcagaaggtatcaggaaggtaggcaagaattggaatctgggtacagatgctggaatagggccgtgggttggatcatcctttagactatagataacgttgcagaagcatatgcctgtaagaaatctactctcatactctgcaagttgatgcccacttttatctgtagaagcagagggccttggggaagttgatcaggggagatcagacaggttaaaacagggtcttgagaatttctccatatatgctgttagtcttgtggtacagtagccctccccttacaggtgagagcacttgctgaaaacataacaccatgggaataaggaaagcatttttgtgtcagctgtacttatggcgagttgatcaggatactagcatagggaagactacatgtgagccaaagatgatctgagaccatttatgggctatgttatggagtagagatctgttttccaggcagtgggaagaacagtggttctggggtggagcctatactggaaaggaataaagctagagccagtgtaaggtccaagaaaacccagcactctcttcttgtatgcctttctgttgtgataaacaccatgactaaaagtgacttggaaaggagtggttatttttcgtatcagaattccagttcacagtccaactttgagggaagttggacagagatcagtaggcaggaattaaagtggaaagcgtggagaaatgctggttgcagtcttaatgttcatggctcatgctcagacagctttttaaatataactcaggcccacctttccaggagtagcaccattcacagtggtctgaaaccttctatttaaaataccaatcaaggaaattgtcctcgcagatatgccacaggccaattgttggaggcaatttctcaattgagattcttccttctcaggtgacactagaatgtgtcaagacaacagtaaaatctaaacaggacagttactggcttgagtagcttgccaaacactgctcctctatttagcctggtttcctataatgatgtgcactgagcattgctagatcatcaaacatgaatttccgaggcacagagtgttgcttatgactctgactctttgtcactaagggctggtactcattgccatgtgcttgatcaggagaaagggaatgggataaagacaggtgtcttgtgcctgctactattgctgttggcatccttctgtccaaatatcctagtgtatggcactattgtacctaaaatcacttacaagagaggtataaaagctgtgagtgacccagagaaacacggtataatcccaccccctccaaaacacttatagaaacacgaaacatacactcccctaatcctctccttggtcttgcaataactgtcaggcctttctgcacagtaccattgatgtgagcttgacttggggaaatttctgggttaccaagtaatactgccagctcttcattaggagagccctccccaaaccttcttgctccatcctaggaaaagctcaggacatccaagaggagaggcctcagctctatgtaggaagcttggagtgtcctggcagaacacaatcttcatccatggcctcagtgtatggtggatcataattgggaatgcattcttacacagctattggcaaagaaatgttgaccatattgggtttcctttacccactagcaaggctgaaaagcagaatctgtctgatacacgtgggtatgaatctcagttcaaagactcaccaatgatatgcatgaagcatctttcctgctttcttattttccctatctggaacctctcagagtccagagaaacctgagtaacttcctgtttctttggtaaatgtttaagtctctgtatttaaccagaataataaattgtcacataactgtgtcattctcatgcttacaacattagggcttcttgagtttttgtgtgctaaattagatggtccatccttaaggttctggcctttcttacatccctggcagccagtcttgtggaagcagacaccttcatttggagataatgaacaaaatgttgactaactgtctttttgtgagtgtgaggtctgggtgagggccttggtgttcctttgtgtgcccttctctgtatctcagagaggggagacagagagagaaggaagtatgggggagggatggagggagggagagagagaaggaaagagagagaagaagaagaagaagaagaagaagaagaagaagaagaagaagaagaagaagaagaagaagaaagagagagagagagggagagagagagagagagagagagagagagagagagagagagagagagagagagagagttagttttttccacccatggagtatctacaaaagcacattgaaatagcactacacacagcacttcttagtaaaagatagctacctaccaggagacactttaaggagggaatgggtaaaactcatgtagtcatatatgatgagccccaagaatatatgataggcttctgcaaatcaaaaaggagaaagctcaatcagctgtgtgataaatgggcaaaattctagcataggcctttcacagagaggcaacacatatggccaatgatcacaggaagagatgcttaaagtcattagtgttttatgaaatgcaaattgaaatcataaagatatatcattttataccaattagcctggcacaaaacgagaggtggaagagaggatacatagtaacaggtgcttaattgctggtgggattgtactcaatacaacccctttggaaaagggtttgccattctgttagagaatgaggtgttatgtaatctatgcctcagcaattccactcttgtgtatccacccaaaataaatgtctacatgaactcctggagacagggaaggccatggtaacattgcatatagagtccaacccctggacacaacccaaacaacctctaacatggagaaaaacatcttcaataaaatggatgagctacagctgctttgaatggtatagatggatcttggcagaataacattgaacaaaaatgcattatacatgatttcatatgggccagctaatagaaaataacttgtaccatcaccccctttaaaaaatgtataaagctctctcaggtacacatccaatgtaatgataaaatacaagagtcaccatggtaattgtcacatgggatacatgagcagcaggaaggagagaaactgttacttattgatggagtaagtcactgttagctttggataagcagtggttttattatttttattttcatatcacaaaataacaagtagtaaatgactcaatctcaaaaatttcaacatgaacagacatcctaaatcaaggaagggctctgacggatataattctctgtacccatctattttgtaaataaatgaatctacaacaaatcaggcagagtctgactcccaatatataccagcccttccctgctcttctttggtatagccaaagccaacacaggttactaaaagcctgtgggaggtgacaaatatagagatgggtcattggggagatgcctctgcctgatctagcctgttgtgtgttgtcttgcagatgagcaaagcaatgtaaaataaaagccaaccacaaagactggacataaagaatccttatcagaggccattgcttcctgatacagaacctcatcctcttggatctatattacatttatgacatcatgttataaaccccaagctgacttcagggtcacaacaccctctcttacatttgaatctccaagggggaaattgtctgctagcgctactcagacattcagacttttataaccagaatcataaaagtgagtttatagtaatgctggaaaatgaagaatgctgtttttttcttttttattggacaatgatatcagatattctatgatatccttcctcttcatttgtccatatacaaggtctgaatggaaaagctttttctctgcccctgtgaagctttctctccctgcatgaagatgacacattcggtaaccttgtgggtcactacagcagagtagactttacctggttgtgccctaattgaagactgtgccctaaatctaaacactgtaagggaaaattgacaaattggaagatgtgggttacaacctagtatctgaatagaagcagttctccaaacaccactcacagcctgcttgctactgtgccctgcagaggctaagagatgcctaccaagggacttgttctggagcctcctttagccacagaagggcaatcacatttctaatttccagttgctctttggtgattccagctccatttccagacagtgtgcaatactggagcaatgtctaattgccactaaagtcaaggtgcttagtgtctgggcaacggcggagaagtgctattattttttattggaaagtactgcagcttttaatgacctaaaaccaacttagatggaatattgcttagcaagaagcaatccctttttatagtagcagaactaaaaaaatgttatgtcatgattaccccaaagctgagtctatagcttcatgccaagtactacacaggcaaataagcgcacaaactttcctgggccatacagaagacaacgggagcaatctggaaagagaagaaatttttatttatgaagagagtacaatatatgttttttagaaatttgccgggcatctggtatgtctcaataaatactgcacttatcctgaatgagtcactgtttgctgtctataggagaagagacagatgaattaagcccacagtttctgctctctggtagcaggttactaacctaaggttctcggatggaaaagcaggaaaacatgcccaagtttaattttaggcctacatcttgatagccttcactcgggagggaatccttctggtcctgaaggatgtttgacaggttgaggtaggagggactgccttcattcttctcaacccataaacttctcagaccaaaggaagactaggcaacattgctcacacatgtgagggggaatttgttaacattctcttttaaattgtattttgaaattaactcactaaatagttggtttccttaaggctctttcatgcagccttagttttggtaaatccctctctcataccttctcacctgtgctatccatgctcagccctgtgaccctcactactcttccctcttcttctcacatgtggtctactatcctttaactcatctnnnnnnnnnnnnnnnnnnnnnnnnnnnnnnnnnnnnnnnnnnnnnnnnnnnnnnnnnnnnnnnnnnnnnnnnnnnnnnnnnnnnnnnnnnnnnnnnnnnnnnnnnnnnnnnnnnnnnnnnnnnnnnnnnnnnnnnnnnnnnnnnnnnnnnnnnnnnnnnnnnnnnnnnnnnnnnnnnnnnnnnnnnnnnnnnnnnnnnnnnnnnnnnnnnnnnnnnnnnnnnnnnnnnnnnnnnnnnnnnnnnnnnnnnnnnnnnnnnnnnnnnnnnnnnnnnnnnnnnnnnnnnnnnnnnnnnnnnnnnnnnnnnnnnnnnnnnnnnnnnnnnnnnnnnnnnnnnnnnnnnnnnnnnnnnnnnnnnnnnnnnnnnnnnnnnnnnnnnnnnnnnnnnnnnnnnnnnnnnnnnnnnnnnnnnnnnnnnnnnnnnnnnnnnnnnnnnnnnnnnnnnnnnnnnnnnnnnnnnnnnnnnnnnnnnnnnnnnnnnnnnnnnnnnnnnnnnnnnnnnnnnnnnnnnnnnnnnnnnnnnnnnnnnnnnnnnnnnnnnnnnnnnnnnnnnnnnnnnnnnnnnnnnnnnnnnnnnnnnnnnnnnnnnnnnnnnnnnnnnnnnnnnnnnnnnnnnnnnnnnnnnnnnnnnnnnnnnnnnnnnnnnnnnnnnnnnnnnnnnnnnnnnnnnnnnnnnnnnnnnnnnnnnnnnnnnnnnnnnnnnnnnnnnnnnnnnnnnnnnnnnnnnnnnnnnnnnnnnnnnnnnnnnnnnnnnnnnnnnnnnnnnnnnnnnnnnnnnnnnnnnnnnnnnnnnnnnnnnnnnnnnnnnnnnnnnnnnnnnnnnnnnnnnnnnnnnnnnnnnnnnnnnnnnnnnnnnnnnnnnnnnnnnnnnnnnnnnnnnnnnnnnnnnnnnnnnnnnnnnnnnnnnnnnnnnnnnnnnnnnnnnnnnnnnnnnnnnnnnnnnnnnnnnnnnnnnnnnnnnnnnnnnnnnnnnnnnnnnnnnnnnnnnnnnnnnnnnnnnnnnnnnnnnnnnnnnnnnnnnnnnnnnnnnnnnnnnnnnnnnnnnnnnnnnnnnnnnnnnnnnnnnnnnnnnnnnnnnnnnnnnnnnnnnnnnnnnnnnnnnnnnnnnnnnnnnnnnnnnnnnnnnnnnnnnnnnnnnnnnnnnnnnnnnnnnnnnnnnnnnnnnnnnnnnnnnnnnnnnnnnnnnnnnnnnnnnnnnnnnnnnnnnnnnnnnnnnnnnnnnnnnnnnnnnnnnnnnnnnnnnnnnnnnnnnnnnnnnnnnnnnnnnnnnnnnnnnnnnnnnnnnnnnnnnnnnnnnnnnnnnnnnnnnnnnnnnnnnnnnnnnnnnnnnnnnnnnnnnnnnnnnnnnnnnnnnnnnnnnnnnnnnnnnnnnnnnnnnnnnnnnnnnnnnnnnnnnnnnnnnnnnnnnnnnnnnnnnnnnnnnnnnnnnnnnnnnnnnnnnnnnnnnnnnnnnnnnnnnnnnnnnnnnnnnnnnnnnnnnnnnnnnnnnnnnnnnnnnnnnnnnnnnnnnnnnnnnnnnnnnnnnnnnnnnnnnnnnnnnnnnnnnnnnnnnnnnnnnnnnnnnnnnnnnnnnnnnnnnnnnnnnnnnnnnnnnnnnnnnnnnnnnnnnnnnnnnnnnnnnnnnnnnnnnnnnnnnnnnnnnnnnnnnnnnnnnnnnnnnnnnnnnnnnnnnnnnnnnnnnnnnnnnnnnnnnnnnnnnnnnnnnnnnnnnnnnnnnnnnnnnnnnnnnnnnnnnnnnnnnnnnnnnnnnnnnnnnnnnnnnnnnnnnnnnnnnnnnnnnnnnnnnnnnnnnnnnnnnnnnnnnnnnnnnnnnnnnnnnnnnnnnnnnnnnnnnnnnnnnnnnnnnnnnnnnnnnnnnnnnnnnnnnnnnnnnnnnnnnnnnnnnnnnnnnnnnnnnnnnnnnnnnnnnnnnnnnnnnnnnnnnnnnnnnnnnnnnnnnnnnnnnnnnnnnnnnnnnnnnnnnnnnnnnnnnnnnnnnnnnnnnnnnnnnnnnnnnnnnnnnnnnnnnnnnnnnnnnnnnnnnnnnnnnnnnnnnnnnnnnnnnnnnnnnnnnnnnnnnnnnnnnnnnnnnnnnnnnnnnnnnnnnnnnnnnnnnnnnnnnnnnnnnnnnnnnnnnnnnnnnnnnnnnnnnnnnnnnnnnnnnnnnnnnnnnnnnnnnnnnnnnnnnnnnnnnnnnnnnnnnnnnnnnnnnnnnnnnnnnnnnnnnnnnnnnnnnnnnnnnnnnnnnnnnnnnnnnnnnnnnnnnnnnnnnnnnnnnnnnnnnnnnnnnnnnnnnnnnnnnnnnnnnncttccttccctcctccctcctcttcctcctcctcctcctcctcctcctcctcctccttctttatttgggatgcatgatagcagtcatgtctatggcttcttggatatccttactttgagttatacctgcctttcacttcctgatttcccccatagttgcccactcctccatgcatacaagcctttctgcatttagtattcaactgcactccattcattcataaacccatcaccaacaccaaggtgaagggaagaacacagaagaagtggtgagaaggatgtgaggactggaggatagagggatgtggtgtgaaatgcttcttctaggcaagaggagactattgattgcagttatgatctctcaacagatcttctcaagacctggcaagctggcaaaaattcctgtgtaggtagattgatcatctccagaccaaaccctcactgagaaactattggcagtgggtggttgctaggggaaggaggatcaccctttactgagggtgtggtcactagtagggttttcatactccagtgaatgtcccaccactgtgcacttataggcagctctgattggaccccatggattgtttaaaaaaaaaggacatatgaagtgggaggaagcatattatagagaaaagggaggagctgaaatgtggaaaaaagaatggattatgatcatatttcattgtatacctataggaaaatctcaaaattaaagaaaaattaacataaagactcatcaaagattggcaattttctgccatatggttataactcaaatatatttttgtaaatacaacttcctaaacaatcacccattcatatacgttttcattctatcttttttcctgataatccagcaaagttgatagaggctatatggatcttaaagcctaaaatgcatgacagttggcttatagcagagctgtggaccatccgtctgctcataggcactgctagttattcaccatctagatttccacatcatctagaagttcacagggacctcttaagtgcttcaatctatctacacagcgttttatagctcataactttctcaagtagctcattagctagtgttctaccacctaggagctcacagatacattcagtaattcattctctattcattactcagcagctcatgttttaaaccttgtcttagggtttctattgctgcaatgaaacatcatgaccaaaattaacttggagtggaaagggtttatttggcttacatttccatgcttctggaggaagccaggatagaaactcaatcagggaaggaacctggaggcaggagctgatgcagaagccatgtaggggcactacataccggcttgcttcccatggcttgttcaacctaatttcttatagaacccaggaccaccagtccaggaatggcaccatacacagtggactagagcctctcccatcaattgctaattaagaatataccctataggcttggctatagccccatgttatagaggcatgttttaaatggaagttccttcctcttagataactttagcttatgtcaaatagacataaaatggtccagcatgtctctgcaccacctaaaaactcataggccatttgcatagtacaggatttcactctgcaacattacagccacatctatctctacagcatctggggtctctcaggcacttctagtagctctttgtctgcctttatcccaactagtatcttgtctctgtctttcttgttctttccagtctattgcaggtggcctaggaacatttccatcactgaacttgaacccaaattttgtgcttacctcgtatagtctaaccttaaaatccattgcacactatctgaggactagagatgccaaatgacttccatatacttttgttacattctaaatagattgtctcctaagaaatggtgactgcccagtgttacacagacaatagtggaacagtcagtaagccagtgttgtcagttcctacaggctggccctaccattttaatcccccaatgtgtttgtcctttacatatgcacatgattttctttccttcctaattccatactaacatagcgagctatatgcccagcttccattttttaaattttattcatcctttccacagcaaagattatttagatgtgttattttatttttgacttccaaactattaaaattatcaattggaaaattctgagataatagaattgagcttgtaagtggttcaaatttatgtgataagaatatgtcacctgacatcagactctagtgtggctggtggaaatatttttcttgagttcaatcaactcgaccaagtaacattcaacatagcccaatgtctgtacagggccatgctcttctggactgccaaatgattaaggctttccataaatcagacctaatatttaataacattgtcaaacagaatatagtgttaatagtttaaatgtcaatctttacagctcattgagccctttgaataaatagatgagaagcttgtctcaaaccttgtggctggagacagtaagttttttcagagaggtagctttggaggctactgtcttcaaataaaatatttgtccctctttgtgtgtatcactgaggtcacaaactaaaaaaactaatgcaaggagaatataactcatgcatcttattaacttttgcacctacctaatgcttgtctgggtaccacctatcagcaaccaccctcttcttttttgctctatggcaagggctgctctcactgtgtgtcaagcatcaattctatgggggatagaagtccagagcactggcatttggcaggagctaggtgatggaggtggccatgtgtgtggcagcatcttggttctgtggcataatgggagttcctactgagaagagagaaaagttgccacaagagtgcgctgggaatatttgattcaaagaccaggatagtttggcatagataataggaaaggtagtttgacccccctcagaaaatggatggcgagattcaggcagctctctgcagtggaaagcagtaactaccacagcagctgaatggtttaggacctaaattatgtcttttatttgtgtccaagttagtatggagtgggagtctctgaacgcctccttcctaagccactcacaatggatgatcagtttttcatttctgtatcttttgtattggctttaaagcactttctccattttgcaggttgaatagtatcttctctttactcattcatttattcatttattcccttattcattcattaaagaagtgcggtttgaattgattttgcctaggagttctacatgtgagtataaattgcctgtaatttaatctgtggctttgagcaatcaaattcaccttggtgaatcattggtgagactttaggaatgtctgcccagctggaaattatgcttaaaatggaatactttgcaaaaagtcaaaaatgaaaagaagtaaagctgcagtactgatagccacagtgtcacgggtcagtcttatagaacctttgttaggtaatattaggtaaacatgcctatttatattctgaatccatttatatgaaccgcaagaaaggtaaatgttatcctgctatgtattctgtgtgtaaagcatgaccagagaacattggaaggtaatcgaaatgtgtatttttgcaatttaccaatatgtaaaattgaaagaaaccctgaggattatagctcaaggtattcagtagatgtcagcgccttgtcttagcatctgccatatgctaggaagagaatgttacagacaaacccccgcagacattcatacaaaacaactggcatacatagaataagatgcacactaattgttcatctcatgaatgtgggcaaaaatattcatttcattaccttcaaacattctctagccatatttttcactcagaatacacaggtggattacattctactttcttgtggttcacatgtatatgaattggaaatataaatatatccatgttcaccctgtatcgctcaacaaagtttctctaagactgacctgtgacattgtggttctcagtattaaattttccttccttccttccttccttccttttttttttttttttttttgctattatactttaaaaataattctcagcttgtttatgtactctgactagatctagcgcattgctgtccttaacaatttagggctactatggataggacaatatgaatatttacccaagtcttttgtagagttgggttttcctttttcttgattaaatacaaagtgtagacctgcagggccctggaataggtatgcatctactgtcatacagcagggcctgtctggtcttgtgctgttccacacacctaccagcaccacacaagttgcttaagttcaggttcctagacatcccaaccaacattagcattgccagctttgaaattatagccaattttaactctttcacaaactaatagtcaattcaccgtgtgtaaagaactaccataataattgttttaagttgataagtgctgatgttaagtcgtttttcatgtgctcattggctagtcggacatcctcttcagaagggggagatcaaatcttttgttaaattttattgggcttttcatcttttcattgctgatttatatgagttttgaatgtattctgtatctatgtcctcaattaacagtaagtgctacaaatataattctcagagggggactggcccatttttttaatggtgtcttttgacaagaggaaatttttaatttttatatatctttttttctttcctatggttaatacttgtgtcctgactaaaaactattgactaatctaacattcagaatttctcttagaagctgtaatacctagtattatgtttcatctcagtatattatatatttaaaatgaggcaattatccacatttacttattgtctataatatggtcacttaaatgggcatcatttgctaaaattatattgctcgcccaatacacaaacgagagacttgattgataatcagaggcaatacacacatgggcctgtttcttcattctctgtgtccctttgttgaacagtttgttctaacaccagtacaaaaatgaacactatagttttacaggaattctatgagttaggatcacaaaattctcatttttttttaatctctcaatttctcatataaaattgtttgtggggctctgaagtcttcattttcatttaaatgttagaattgtcttgtcaagttcatcaagaaatttgctgcggttttgctgcccatggcacgtagagagcaagtgggtgaagactatcttcttatgatactgagtcttgagtatgatctgctccgaaaaacaaaatcaaccaaattttacctcattatttttctctgttgtttctattttgatttcatcttttctgaaaatcttttcttttgtttactttggttatggtttccattatagatcattgattttatacttgctttctttctcaatataagcattaaatctgctcatttccctcagagcaccattttaactacatctttaaaaattttatatactgctttttaattctctttgagttcaaaataggaagtatcagtaggtaacaatactgtactgagcatttaaaaagagctagaagaaaggatctggaaaattctgtcatgaatatttgaggtgatacacatattcaacttgatttaaacattatgtagtatgtgcaggcatgatatgccatttcatgtgcatgctgtttttatgtatcagttaaagtttaaaaatgaaaataaaacattaatcatttttccaaaagaaaatgtgatttcacgcgacattttatatctaagtgtccctattgaattctggtacacagaaatcattggttgtagtttagttttgaaaaggccttggggcaccgagcatggattttgctacttactgagtggggttggagaattcctatgatagttctctctctctctctctctctcacacacacacacacacacacacatattttacagttcacatggctctgtgctttcctgttttgtagaggaaagtatgagagtgcacgagaagactgtcaagcaggaaattaaacatacggaaagataatgggactcagagaggcagaaaaggaagctgaacttggtgtgaacaatgcccatttgtattcccgcttagtgtacagtttccttgtaggagaatggagatgatggcatttcctctgttgttgtctaaatctctctttatgatctcaggcttcaccctgctgagttctagaggccttggcaactaaaggttcctgggccttcttttctcaccttagaccttggaggtggtacacctcacccacgtgcacagagccatccccagtctgcggcactggtaaaacaagtggttttgataagcaaagtatacagcctgtgtgtttatattgcccatgtaatatttaacaattaagagaatgctaggccagggagatgactcagtagatataaatcatgtgatgtgcaagcctcatgagccaaggtagatctttgcagactgggagaaggagagacagcttctgaaagttgtcttctgcacatctacctgatacatgtgtgcccatccacacatatataacacactcaaataataaaattcatttttgaaaagttaacctaagccagaaaataaagtaagcagaataagcctaactaactccccccttttttacagtaatctaaatatgaatttaggaagtattttatttatgtttaatcttttgtaaatttgtaccaaatgtttatatacttattatattctaaaatgtgtcttatctttactgttgcaaagttcagtcatttagtgcctagctaacaatttggtaatgagatataagacaatttacctaaacccacccttggttgtcatttggataaattctactttttatacatgtaaatgttattataatgaacattttcacgcgtaatcttttttccagttactacagttttttctgtaggttgaatttccaaaagtaaagtcctattatagaaaagagtataaatgtttaaaaactcttaacaaaataatgctgagtgttactaaaagcagaggttgagcaaatcagatacaatcttatttaaggggattttaaaaaattcaaaactgggtaaggcctctcacatttgtccagtctgggctgtatacggagaccctggctcaacaaacaaacaaatctctctctctctctctctctctctctctctctctctttctctctctctctctctctctgtgtgtgtgtgtgtgtgtgtgtgtgtgtgtgtgtttgtgtgtgtacatgccacagagctcatgtaaaggtcagaggacaacttgcaggagtctatggtatcatttaaccatgttnnnnnnnnnnnnnnnnnnnngtctatggtatcatttaaccatgttttcctagggaatgaagctcagaccatcagttgtgacagcaagtccttttatcccctgagttatctcactggctaagagtcattttaagaaactggaatttttgtctgtgtgtatattcatatgtatgcacgcattcctgtgattttccttattttattcattattcttgaaagtacattgtttccagtatatttttcttttacatacttttatctcctaggactaagttaggcactgccatcatcaactgtgatgtataaattggggagagtagaagtaatttagtgggatcgtggttagaggtctacaattgcacaataatgagaattgatacatggtgtacacatacaggcctgtcttaggccttctatttccgtgacaaaacatcataaccaaaagcaacttggggacaaaaggctttatttcatcctactcctccaaggtagtggtccgtcactgagggaagtcagagcaggagctctagcagagcaggaacttggaggcaggaactggtgcggaggccaaggaagagagctgctcactggctttctcctcatggctttctcagcctcctttctcagccaacgagaggcactgcctacaatgcactgtgccctcccacccaatcctccatcacaaaaatgctcctcagctttgcctacaagacacatttgttttaaattaaaagattaagaggcctacttcccagatcactcttaaacatcaaaaactagctagtacaaagccccctttcccagcattactgtagctctgtttgaagtatttggtattttgttcatatattccctagttaattcatttactagtgttgggattaattaatatgtaaaagtggacatgatgtgttcagtctaacactgagaatcaatgtaaggtcaaagagaaggtgtaggtttgatttgggactttatattgctgttttcttcctatttagccagaggcttagtcctttcgtgtttggacttacactctgactatgaagatgtagagaccacaagaagtggtatgaatatcatgggatttcctgaccaactgaggcagtgacccatcagggtgtaaacttggctcatcttctagacccaaatcctcatcctgagactcttcacaaagggagatgacactgtagtcagaacaatgccttggcttttgcctgccattcatgtgaattcttgttacaagagtccagatcaaatcataatcttgctaatcttgtatgctatggtacacagttgctttgttttgttttctgtctgtcaggctgtctgctggctgtctctcaagcattagtggcagcctccttctcccctactctcctgcccctcccactcacagcactgtgcactgcagagcatagcctcacagaatattatccattcgtcagtgccctgtctggcctattccgccagacttagcttctctacagtgaggctcctttttatattgtctgtccccaggaatgacctaaggaaatagcagaggaactttggagattacttatgcctttataaagcaaacagaataaatgttcagtgactaagaagtggaaatgcataggcacagtgatgaacatttctgtcttaagcatgaatgagcaggatggctgacagttcatagataagcatagcatggaaggctgagatggttaagaacagccagagtcctctgccctggacctattggagcatactctgcctctctgggatgctttaacacacaactggctcatttggcccctgtatgaccccttactgcttaattctgtttgatggtgattggtttgggataatacagtccaaagatcaaggagagcccccctccgagcctcccttattaaattactttgctttgggttttgagcattgccaagcaaatctcgttatgaattcttcaattactttcttttgcaatttttataatttggtagggtaagctcaaaccaatatccatgccatcatgctaactttgattattttcaaactcctcattagagaaagtaggaggatgttgactccccttaaatctgattttattttacagatttcctctgccctgtaatttgctttgtacccaagcctgatatgcttcaccttaatgctggctgtaaatgtgggcagagtccattctatttgttccactgaatattattgctttgggttttatgacttaaggttttttttttctttgcattttgaagggaaccgttttgttatttgattacataaaaatcaagaagcagttgctgatgaaaacaattttgattgattgcatcagctagcttgttggccatttttgataagcttacttttatttccattttcttgccttaatgttgtttgtccaggagcacaaagagagaaaagggagaataataatacttccaaagaaatgggtgtgagtggcgctgggctgatatgcctcatcttcacagagggatgggggtgcatttgctatggtcacatattgtaaatataaaatgccaacatcagtagaatttcattgatcaatagaattatcaaactccttctgtcattctatattttattaatatcaccatcaacactaatatgtctcagtagaaacagtgattctacctacaaaatggatagattttatagagttgatgattcttcactcttaaacatcatagaggtattacgatttcctgtgggatctatatttcaaaattgtaatgtgtgtgagagagagaggggggagggagagggagaaagagagtagatcaacacaaagggtaatgagagggtgagtacctcaattactcaaataagtaggagcaatgggaacagtagaagttctgagaaacttccctgttgaatatcagagaaagaagcagagatggatggttatctgcttaacagaaacctttaccagtgtaaatgggtacctctcacagctaaagattcctcacaaggcaaagaactttgccttactaaatgatgcccacgtgccagacctcagccacatagaaaagtaatgaaaagaaaactctaaacagtgtacaaatactacatccccaggctgcgtgcagagcctctctcaggatggttcagggtttacacatatcccttagccagatagtcatctatgtggtaaacttcagcattcccctccttggcaaagctctgacccttccaggtagagcctgcaccaggtagagctgttcagaatgaaagtctgtttggatcttttttagttaggtttgacctactttgcagctccttagtgtgtttaaagggtatagtgcaagctatgtcaatcaaggctgacattttagcaaaggccataaagaaattcttagctgcaagtgggctggaggataaggctcttgaatgtaaaccctaggcatggtcaccctgtccattaaggacactttgtagaatcaattgcaatcacataggattttattgcctctctctccttacagcattatcagagtcaacagtttctggagaaacagtaatgggaggtttcttctgatggccaaactactctggtctcagggtttagttctcagatctcatcagaaatagacctcaatgaagtcaaatgcccagttgcagtaacaggatacaatggagaaaaagtgataattgaatcaataacaactagatttggtattctcatccatcttttgccagttataaaaacttgaacaggttaatgaactcttgaacaacataatgaataacttttcttcctagaatgattatggagattataggtagtgtggagggcatgcgggaacttgttgaaaatgtcaattcttgggctctgattcaggtctgatgcatgagagattgggaggagatagggtggagggcaatctgtgtttttccatactttacaggtaggtctcatatcctcgtggatgtgattatatctctttgaaatggtaatatgttatgattgctgaattagtactggatctataagtctttgagactgattcttagaagttcagcatgcccattgatgctgtctgtgtaggttgaatgctggaatgctgggaaagttttaagcctacagcagagtaaaggatacttctagaggggatatgggatatggccagcccactccatcaagatccaaagctcctcaagtttatctgacaccaatcgtatgctagacactatactatccaatgaaaattacggtatacatgataaatgtattcacattttccctgtgtctggatctctctgtatgtgtgtgtgtgttatatcatgcataagtatattcatagttctatcacaatatattataacatatttgcttgtgggtgtaccatctatgttttctgcgcttacgtattcttaagagtgcttcagttctgcagaatactactgtttattttgcattcctttttattctcagaaaattatgtacatgaatgcaatttattttaaaaattgtttcttttacttttgagaatataatgtaattatatcccctttctctccttttcctcactccaagctgcctcatagacccctccttgctctctttcaaattcatggccttgcttttcattgttattacattcatattttatatgcatataatcctaaaaagtaacttatccagtttgtatgttactcctatgtttgttttcacatctcagcattggtattggataaccagtagctatgcccttccttccctggggaagctcttttcagtccctttgaatttgtaaagatttgctttctgtcgcagtatgtggtccattctagaaaagaccccatttgcttttaagtagagtatatattctttgatgtgtgggcgaaaactgtttatagctatctgttaggtctatttgatttgtaatgtcaatttcttttctcttattttggcctgatggacttgtcagagagagtaggagactgaaatcacctactactaagggctgatggcaatttatgctttaaatgctgtattagatttttgtttttgtttttttattttattttttatgaaactggggacactacagtttgacccatgtatgttcaggatagatagtaagtgttgtgttttataaaaataaagggctgagggaagaaggaatatgtgtggtagatgtgtagtcaagtgtcagggaagggagtgcctctgtgggcccatgctgaggcaatccttcccctaaagggacaagccataagaaggtatagcatataataggctttattcagggtgtggggaagagagttaaaggagtagagacagagaaatgcagaaagagagtgcaaatagaggagtagaagccagccatgagcacatagagaaagaaaggggaggggaatggagagagggggagcaggaacaagaacaagaaagcaagagagaggagggggcaagcagccccttttagagtgagtcaggcactcctagttgttgccaggtaactgtggggcagagcctaggaaaagtgccaccagtaaggtcttcttggccaactgttccctttattagaatgaaatctctctatctcatttgattatttttagtttgaagtctatttttttatctgggggataaaatatttttatcagatagtagcacagtggcacctgtttgcttcctggtcccaattggttgtgatattgagttgttaaacctctcattcatttctatgctttccctctaaggcagtgcctgaagtgtgtttcttgtagacaacaactaggtggatgctgtttcttggtccattcagtcagaccacttgtgcattttgattggagaattgaggggattggtatttaaagttattattaaaatgtgtatattaattgtatcattgtgttattgatttttggtactgttgtgctctcagtggtactttgtgttttaatgcttctgacttcatatttcttcctgtagtctctcagctctgtttcttcagaagaaatattgtgctctgtattttctttaggtttggtttgttggatataaatgtgtttttaggctttttatattgttaaaaaaattttcttcctcagttatactttttctggtataagagtccaggctaaatagtatggtcttttagggcttacaatgcatagctccaggcttatggctttcaattttctattgagaaatcggctgttattctgatgggtttccttcaaatgtgatgtgttttattttcctgtggatttcaatacaatttctttgttctgtatatttaatacttatactataataagtcatgaacattatctttccgtgtcttctttatttgatgttctgtgtgcttcttgtgtctatatgggtgtgtttttcccttagtttggtgaagttttcttctgtgatcttgttaaagatctaatctatgccagtgacttgtgattcttcttcctcatctgtgcctataattcaaagggtttgtttttttttttcttcatggtgtcccacattgcttatatattcctttcctgggctttaattttttatttttcttggttatttttgtctggatcatccatccactttatcactgagtcttgatattctgtcttctgcttggttaatctagctataagcctctcttttgagttttctatttggactagtgggtttttttgtcttgttttttgtttttgggttttttttttgtctttgtttttgttccatcttcacttaagcttgagtcttcttcaacagttctatatctttattgaagtttgttctcaaggcctggattaccctcttcacttccaccaacattaagttgtttccttgggcatcactcaagtgatcatactccttaagttctctttgcttaatttcattgggcagtttgttggttggttggttggttggttggttggttggttggttggttggtttgctgtgtgttctttaattccttgaatcatttgatgcagtttatggattttttaaaaattctgtatctagtagttcactgaagtagttctcattgtcaaacacgtctacagggctagtaggttttggagagaaggtgctagtttgatatttcatgtttttcatggtctctttttttctcctgatgagatatacttttgtgaacttctttagttaattctaagtctcatatggacaaagcagcttgtggaagaagagagagtttaagggagagctgggtttagagattgggaatagcttgggaagaatgaagtcaggtagacagaagtaactgggatgatatacaggatatgcctcctggcccagtcctggggtttgatgtagatctagctggttacatgtggtatgggaatgccctgtgggttggggcataaacagaatgggtcctggtggaagtgtggagatttgttgccatgcaggcagttgtagccactgcagactaggacgatggatgtgggacctaagctagttataatggtttagagatagtacatggagaggtggctcaggcagactcactggactagaccccctgacttgaaggttgggacgttagatgtagcatggggagggcctgcatgtggtagcaggtaatatgggtcttggaggatgtctagagtttgtttgtgacataggcacggtagccaaacaaagccaggacactgtatatgggacctggcttagtttgtgtttactgggaagggtatgtacgaggagggtcaaagagactcgatagaatagactcttggaataagaggtaggagatatggctgggtggagagattgatgtaatatatcttggtcataatcatttctggctctcttctataactcttctaggacctagctccattatgtccttctcccagagtcttcatgtgttatttatttatttatttatttatttatttatttatattgtttagtttttaactgggcagtgttttattttccttcacaacttaataaatacttcttgatgactgcacatggggtaaggctgcttggtagttcagaaagaccccagcgatggtgttttcctgacagggtgtggtcttcagtattgagtggaatgacgtgtatgagtgacgtcactgtcaaaccagcaagaccgcatttatgcacccatcgttttcaggattgttggtaacttggtcatagtttccccaaataaccttgccttcttgtgtcacaaggcccaactcactcacattcacttcaataactgtacctttggtgatcacaaacagggttgtatataatgggaataatggattcttcttcacactaagaataggcaggcaaaaggtagctttcagctcaggatgtgtgacatggtgttttgttttttgttttttgtttttttttttttttttttgaaacatagacccattggcctaatgaacctttcatatttaggtggttttcttataaagccattaccaacaaagtaaactttaataaccattctcttccatgccttcttttttctttttcctgttcgaataactttcaatacttctgtttctccttgggcatgaactttgggtagaggggcctcccatcttccagccttttttttttttttttcgtttctgcttattcatagatctgtgctgattccagccttgctcactgaagcttctgatttcagtgggtaggggttaataaagactcattactgttcaaaatgctgagaaaataaatgactgggaatatttagccatagatgggacttctatattcattcctccaccaaaagctatcatgttggaaagtacttttgctttcgactgcctctctgtccagcagataggtgggaagtgctccctgtggagttgtctcttcatccttcttcttggggtttctcttttcatgcatcttaatagtctttttcatttgtattttctcagcatggtgctgtttatggtagagcttagccttcaggccagtcatttttgttttgctttgctttgttttgttttgtcttctttgaacattcatgggcctcccgaccttctttctctttttctcatgatagtccaaacaatatccatatcttttgctgtgcaattcaatatattcattttgtggcatgatatcagctgcggagcagccatctgcaacctcttgggttacaaaaagctcttaatttctgggtgtcacaggtctacgaaccatttatttatttatttatttatttatttatttatctacttatttgaaccaccaattgtattgcctgtgtatacactggcatggagaatcttccagtagccatactccaaatgaaaagtaactccttgtctcccagcatctatcaactgccaagagtttctcaggcagacatagggatttggggggcctcttcagtccctgctggaaatgttgactatattgaacttatgtaggtcttgtacaagtattcacagatactgttggttcatttgttccagagccatgtcatgtttcaaagagagcatttcattgtactgtttcccactctctggcttgatttattctttccctctcctcctcagagatatttcctgagcttttggtggaggaatgaatatagaagttccacctatggctaaacattcccagccatttattttctcagcactttgaacagtaatgagtcttcattaacccctacccactgaaatcagaagcttcagtgagcaaggctggaatcagcacagatctatgaatataaaaacacatatttagaagtcaatttgacaacactatcatgtagaaaaataacatcaatgatatctcctagcactcctgacttttctagccttggcctttgaccatatttatgaattcctttttgaggagaagagacgtgctgtttatgtattggtggatatatcttgtccaacaggtcagaactgtagcaagcagggtttggtgcttgataagatcattgatatcttttctttcccagcactttgtattgcccttttaacactttgaaaattagccagtagtgttagttcaagatggatatctctgtgttctgtagccaaaatgggtgctgccttcagccatagtgtctagttaatatggacaacaaaaagcaatgacagttgcttgtactattttgaatgcctccagggactctctatccaataactgagaagaagagaacccatgactggcacagattttcatttaattacctatttttacagggagaagtggcgttcaatagttctgctcatttatattttatattatttttataatctagtttgtatctaggcaaatccatctaatcttatttttagatcactcaatttttttcccatgaaatagctcagattagattgttatttatcatggtctttggccatcgtaaaatgttgacaaatcattggaaagcagtgtgtcttcttgtcttgctgagaaacttgtttatagccctccccccagtttgacaacagtagacagttttagatgttagggaaggggccattgattcttctgagttaaggggtcttctttttgcctttgtacaaagcctgcatcttctcttgaaaatgtggtgagccttttcttggtttcttggatctcaagagaagcaaaagtagattcagcctaggatcaaattggggaaattggcatccctaataatgctttcctcagagtctgacagtagaagcaaagagaacatcagaacagtgtcagttgactgaaagaattccaagtggctctttgagacttctagggttaatttttttgagaaggatgaaaggaaagaagtccattctcagtgcaaatctggggagaaatttgatctccaacaataatggattctctgacattcaggaacaggtttttccaagtcttgaatttcttgatggaaaatggccagtctgtatcatagaattttataataactttgcaataagagaatgaatgggaaagaactaggtaaagagccttcctggaataagatgcctgatgtgatttccctttacagtttcttttagtaccattggtccctctgatcttgatctttctttctctacttagtaccctaaatacaaggctgcaatattcttcttttttctaaatcttctttaagagagatagaaaaattgatttattgattgatatggttacatctcataacttctccattggtgctgatactgctggcgtccagaagacacttagagaaccatggcctgtaacatggacttggaagatgctgaagaagactttaaaggccatctgggtttcttccttttcataaattgataatgagtcagtaattgggttgagactgtaagccagtctaacagtctttctcatttaccacactgatgatggaagacaatttccagtattatttatcccaaggcaattgtgttttagtcaagacccaaacttaatgctatgatattggtgatgattatgattatcagggtcatgtgttaacatttgttccagatcctttaatgcatcaggcactttccatgttgactttacttgcaacagttatgtgaggggacagtgccatccttgcactccatgtgagaccactcacccaaagagctcagatggctggctgggagtaccaaagcacaacgttgcctggtgtgtccaaatcttatcaccaacaccaatgttgcattttggggggaagttgaagaccctagaatgaaaattaaagtctccaaaagagatcacatactagaaaaagcaccatgttctttactgagatgcacagtcacctgttcctctatcatttgtgctccttactgttattgatgctaatcagaacacatagatacaaacactgaaaggacagtcactggcagaaatactaccctcagactgggcaggaactccttttcctggctctagccctggatggttcactcattccatcccttggactagggaatggacaagctcagcttgaccaccaagaccaaatttcaatgtaaccttctgcttgtactcatagccatacatggaggtcatgctgtacattgctgctcctttggttgagacctctttgtctagctccatcctgtccactctggtatgaagacaggacaagttgacatggcactctctgaatatgttgagataacaattttatggcaggtgtgtggatcccagcatggatctccctccctcccactgaacctgttctgttttttcccttttcctggacctgggtccaagttaggtaaaggtctttgtcttgtactcattaaaaaaaactgctctcctttgcttccttaattgggctttgtgaacagcctcccattaatgtatgttctcatgtcttttaagacgaattctttcttattctgaagaatctttttttattatatattttttattatgtattttcctcaattacatttccaatactatcccaaaagtcctccataccctccccccccactcccctacccacccattcccactttttnnnnnnnnnnnnnnnnnnnnacccattcccactttttggccctggtgttccccctgtactggggcatataaagtttgcgtatccaatgggcctctctttgcagtgatggccgactaggccatcttttgatacatatgcagctagagtcaagagctccagggtgctggttagttcataatgttgttgcacctacagggttgcagatctctttagctccttggttactttctctagctcctccattgggggccctgtgatccatccaatagctgactgtgagcatccacttatgtgtttgctaggccccagcctagtctcacaagagacagctatatcagggtcctttcagcaaacgcttgctagtgtatgcaatggtgaaaaatcagaaagaaaggctccttatttccagaagaaagagaatgtccctgaacctcttatgattctcaaggtaattggctgcctgagttctctctgctatctccaaaggagttgctcctttacttctttctctctcacacattcatatttacacatacaaacatatgcacagttacagttccatgcatcatttgcagacccacactattcttgcttgtacttatacaacttcacctggtcacatgactcacactttcacacacacagtcacacatatactcatgcacattcatatacacatatatttccacagcataacagtatatatatatatatatatatatatatatatatatatcacccatttcttcacatttatgtaccttcacacattaaataattctcacaatgtactcacatagacatacatgttgacatttattttacatgtacacataatacattcccatatacatgcaagcttttatacactgtcataattcctcctacactaaaatgaatacatatacagttctcaggtacttgattacacattgtcacacattgcacacatgttctacacagagagagagaatgggagagagagagagagagagagagagagagagagagagagaggatgagaacacaggttgctgatttggtggagctggtcgatgagtggcaggtctcttaagagcaatcagcacttgaaaatgtgggttcacttcagagctatatgcagtaagggtgggctttgtctggcactgtgcacttttcactgcatagagctcaagatgtaagactgaatttcgaaaaattaccctcttagacacctgcaatcacaaatgaaaggcttgctgcactgcacaaacatggacaacagaagaaaaaaatcttaagtgttctcctatcatggctctacctggagatggccattgttagtatttggtactggatttgactcttcataaatatggtctttggccataatcgctgaaaagagatatcatccattgtaacaagctgtttttcactaaatattctaatattagttgtaactcatttagcaaagccctaagcgtatcatatatattgaagtatttaattttcatcagagctctgtccattttatatccaggagaagcaaggcccagaggtgttaatcaacttatcagcactcacacagctggcaagcaatgcacctgggatccaatccgtgtacttagactctgaagctcagcctaatgcatggcctggggctgcctctttttttttttttttttttcttctttttaccctggacaattctctcaatattcagtgttttttaaaagtactatattaccagaaagatattttatcatttaatgatactacctgattctcaagtaatgtgcatttagtttccaagtttcttgaaggtttaacagtattgttctgatttttttttgtacaaacatcttttcagcaaataagtaattgtatagaatacatctccaaggggtgaactgctgcatatgcagatttaaaaagcgtgcaattctcttcaccgaattgccattccagaaatatcatgccagcccacactcctaccagcaagctgtaaaattgtccttttcttggcagatggtctctgggttttcctggtgcctcttgcgacttggcacagtaaataatgcaggtatagcagcagccagtgttcaggctgtgcctggcaatgcatcaccattttatgactatggccataagagctaactctttagatatgcaaaagccaggctctgctagagaaatgatgtaggaaagggcaggaagcatgttccatgaatggccagtacaaatgaagtgtccaaagaatctttgaggatggtacctacctgtgtctttctttctcctagaatagcaaaaagttccatcaagcatctttgtctggaaagcatgcatagtcattcacatgtggactgtaaccagcgtactccctcaggaaatggttcaaaggcatagacctatggagtcttttccacagtcctcatttcatgggtttaagcagggcagagaaagcaaaggcgccattatagaaagttggaaccaggttggcctgtcttcgtgtttcatttgtcaggaataagactcttttctagagccctggtcacttcatctataaaaggagaccaaggctttactcttgaggataattctatggctgaaagatattggacttgtaagtactggcatctagcagcttgctcctggcactacagatgcccagcttccctcaactcttcatttcagttgcatttgtaactgatgcttggcagcaccattgttcttgcttgtttggaatagcattgtggttgcattctcccttctctaagcagttaggatggaagagaagaacataatgagatccttatctccaaggctgatggctctggaagtttgcttcctgggtgaactttagtaaggatggaagcaatggagcaatggactgcaatgcaatctcagtttattatcagtatggtacaagggtaagaaagccagttaccatgctgcagctcaccggtggctgtctatatgcctggtcttcctcaacaatagtctctgatcatgatatgagaaacgttaggagagagatgttaaataaagacttagccaggcaaccctttgtctctgttcccagtgacagcctccagggtttcaggcagtttaggaagggagtgaacctcagggaaggagcaggattctatcttctatattctactgcttagcattctgataacttgagttccacaggcccttgactttattgaccttattgattgccaaagatactctgcttcctttccctaacatcttcatgtgtatgttcttcaagcctgtgccaatgattgttgttttgtcctaattaattaatcaatcaatcaatcaatcaattttgtatataagagaagaaaaataacagcaggcaaaatatttagaagcaggttaagatggcattaaaaatttcccaagactttcagggttgtgtgtacagtttttcttcagtctttgaacctagtgtgtattgcactgatgtcatattcatgaactaaattatttccctgacattgaatagttaaaatattcacatttatgttagtatcaactttttaaatatttctcatgtttcatagatatacttgggtcactggggttaaattccaatttgccaagataagagatataagaacgtgaaatgtctattatatgatgctatcatactttccaaagaacagtatcattttctggtgctagtgactatgaaagacaatcctattttacaatagtttcactgaaattggtcattattaattaaaaattgtactgtagaggcaatcacattatatttccaggcaatcttaactttgccatctctccattttacaatctataaatctccactacagcacctagaggaagttaggactggagtcccaggaccccagccctaaggggccgtccaggatcacaagaaactagggagctggctatatatgcccatctaagcttcatgcataggcaagggctagaagaacatcagaacgtgttgagaaccttgtttgcagcccagcttttcaaaacctgaatgatacatggaaatcaatgattagaaattgagagtaggtttaatattataaatggacagccagataaagacaattcaaccaaataaaagagtgaaaataagttttggatttttttttgttttaatagcacaacaaaagtggtagtatcactttgatctactaggcattttgaaataatgtcaacactctacttcaaaacacctcacagcctgttgtgcctgttctcagatactgcttcctgcagctcatcacagcctcttgctagggtagggaaaggaccacacggagggatattggcagaaggaagtaaaaaaataggaagtgggaaaaatagagaattcaaagatctgtagggacatttaggagccctgggacacggcagggaggtgactgtgttcatcttctatgtgaatgttgcacagttgagaacaggctaaatccctacatctatgcattcttcttggagtcttaaaaacattccttattgaaagaaattactgccgataagaaattggtgttgtatcctagtgtgacagatttctgaagtggaatttcaggagtggaagatggaggaagcatgatcgacacactgtctcaaagaaaccagagacatgacaggaccctgaggctggactgaaaagctggatccaagagcaaagtgggaagaaaccctggcttggtgtgtacatcactttttgcactgctgcaatcatagcatctgacataagcagcttgaggaagggacattattctagccctcagtttcagggggttccattctatagcagaggtggaatgacagtgtttaaactcattgatggagtcatgttctggttgccattcacatcacagtgggccagaaagtgaaaagcaagccaagagccagggcctgcatataaccttcaaaggctttctgtagtaacctatggctctgtaaagggtcctgtcttgcaaaggtttcaaagtttcccaaaatggtaccactggctaggaaatagatattcaaagcacgtgtctagtggggacattttacattcaaacaaaacacttaaaggaaaagtggttataaaaggaactagagaagagtcttggttcctttggggttcaggaacttgaaatacttaacgttaccaatatgattaaacctagcttgtctacaaatagcatcaagtaagaaggtagatttataattgttagaatgcatgtagaaaattggttctcacaggcagtggtggcacatatctttaattccagcacttggcagaggcagaggcagaggggcagaggggcagaggggcagaggggcagaggggcagaggggcagaggggcagaggggcagaggggcagaggggcagaggggcagaggggcaaaggggcagaggtagaggggcagaggcagaggcagaggggcagaggcagaggcagaggggcagaggggcaaaggggcagaggtagaggggcagaggggcagaggggccaggcagaggggccaggcagagaggcagagaggcagagaggcagagaggcagagaggcagagaggcagagaggagcagagagaggcagagaggggcagagagagacagagaggcagagagaggcagaggcaggtagatctctgaggccagcctggtctacaaagtgagttccaagacagccaggactgcacagagaaaacctctcaaacaaacaaaaatagttctgacattacaaaaatgtgtttcccagcattttattttttattagatatttttttatttacatttcaaattttatcccttttcctcatttctcctctgaaaactcccctcccccatccctctcctcctgcttactaacccacccactcctgcttccctgtcccaccatttccctacactggggcccttcacaaaatcaagggcctctcctctcattgatgtcccacaaggccatcctctgctacatatgtggctggagccatgggtccttccatgtgttctctttgattggtggtttagtccctgggagctctgggggtactggttggttcatattgttgttcctcctatggagctgcaaaccccttcagctccttgggtcctttctctagctcctccattggagaccctgtgctcagtccaatggatggctgtgtgcatacacttctgtatttgtcaggcactagcagagcctctcaggacacagctatatcagactcctctcagcaagaacttgttggtatctgctatagtgtctgggtttggtaactgtatatgggatgaatctccaggtggggcagtcactggatggcctttccttcagtttctgctccaaacactgtctctgtatatcctcccataggtattttgatcccccttctaagaaagaccaaaatatctacactgtggtcttccttcttcttgagcttcaagtggtctgtgaattgtatcttgtgtattctgaacttatgggttaatattcacttatcagtgaatattatatgaatattatatgcatgctatgtgtgttcttttgtgactgggttacctcactcaggatattttctagttctatccatttgcttaagaacttcatgaattcatcatttttaatagctgagtagtactccattgtgtaaatgtaccacagtttctgtatccattcctctgttgagttctttccagcttctggctattataaataaggctgctataaacatagtagaacatgtgtccttattacatgttggagcatcttctgggtatgtgcccaggcgtggtatagctggcttctcaggtactactatgttcaattttctcaggaactaccaaactaatttccagagtcattgaaccagcttggaatcccaccagcaatggaggagtgttcctctgtctccacatccttgccagcatctgctgtcaccagagttttcgttcttagccattctgattggtgtgaggtggaatctcagctttgttttaatttttatttttcttggcatagatacatgtatctacatgtgtgtgtgtgtgtggcagctagaactcactggtaggtctcattctcaattgctctcaaccttatattttaagagaaagtcttttcactgagacctggaacacacctctttagccaaaagggctggccaatgaagcactagggacctcctgtctttatttccccaacactgggattataggtgcttgcagttgtattgtgattctttacacaagagcttgggatctgagctcaggtcctcatgcttgcacagcgaacattttattgactgatccatctctctaaacatttggacttctatttagttacttctgaaacattcatgttgcacagtcacattaaagatagctgtgtctcctacagccttggtgatacaccagaaagagtgtggagataccttcaaggtccaaaatatcctccttaaagggaaattttggtactgcattttactcagtgtggggctaagagacatgggccagagagttctggggtacttatgatggtaaaaagatttttttgttttgtttgtttttcactaagaatatgttgtacaaattgatacagatgctggcttgcccatttgcagttaggtcctgtcacagcaagtgtcccattaccatttactagtcctcatgttatggtttgagcatgtagactagaggtctagccaagcttcctcaaacaaacaagaaagacagtggttattgtttacaaatggagatggtgggtatttaggatcaagaaggcaagttcttacttctagagaaaatccttcgtgtgtagcttggaatagaggcaggggaattgcctgcatggttttcagatgttgcgttttgcacagctttgtccaataatgctgtagatgcaggctttctacccagtggctgtgtgtgcctatctatgagtctacacattgcatacgcatggacttgtgacttgaaggactccagccaccccctctgagaatcccacctgtggtcacaggggctgttctaaagtcagttttcagttggcctgagccagtttctcctttttttttctttgtgaaacatcacttgagaagtagaaaggaagctgatcttaattcttccttcaacatgacatgcccttttgaaatcgtacaaataaccgtgtctgattgtcatgttgaattgcaagcgtggatgtgaaatgctcctttgtccgactgaagccaaatattaggtcataagtcaacattttgcagagaaacttggaaatagaggttgaaaatttatatcttttcatgggaaaacttgtttgccagtgtgtgtgtgtgtgtgtgtgtgtgtgtgtgtgtgtgtgcgtgtgggagggggattacaaagactgttatcttcctatgtggatggagagagatgtatgtcattttgcaacctgggtcaaagtcctttaagacttctgagattggattggccaaggaatgaggccttgacataatatttgaatggtgctgcaggtgacaggctgtaggtggcacagatgtgtatcatttcttacaaggttatgtgaaaggctgcaagaagccaattcccagtgcaggaggtcatattctgcccacaactatttctaatggaaagaatctgccaaggaaataagacatcttgggttgtggacacttagggtattgagaaaagaaacctcctgctaggcgtggtgttgtttgcttataatcctactacttgggaggtttagttgggtcatcatgccttaaaatcagcctgggctatatcataagatcctttctcaaaacctaatcttcccaacccaagggaaaaaagaaaaatgcaaagaaataaaagcctgatttttagcatccatttacttcttggagaatctcaggggaaatgaaaaggcaacaaaggcaggaactggaacaatgccctggacagtaccaaggagcctacagcttgccaacttggtttaattttgtctatgatgcttcagccctattaccaagtctacagctatgctttacagcatccaatgtgagccatagtggtaaggacaacaaggcaagaggcatctgtgtgttaaacagagaaaggaaactaggcactttgatacattaagaatgttatgcagtattttaagaaaaccaagtgacaatgcctctttggaagaagaaaagccgttcacattccttccgagtgcccaaattttagtccaatttagaatcactgatcaaaatagaactgagtgtctgctgtggaagagtttgagaggtatcagctagggatgcagctagattcacagttgaagaatttgcaaccatcccattgtatggaagtactggggccagaaacctgctcttgctagagcacgataatctaatttaaaggcagcctaggcagcacagcaaggttctgtttcaatcctgtctgcccacaacaaagaaattaaaagatgcatgtatgtttacattgtgtatgagtgtatatacttatcctcattgtacccatcacatcccattccgtaatgaggtcttcccatgcatagcaaactctagatgtgcttttgcttggtatttcatcttggccatccagagacacgaaacccatgtacatgttcatggtaagcaagacgtggcagtcgggagattattaataaaaattatcacaatcccttcaacatttatatggtatttattatatggtattatgtggcccctaaaactctgctctgcagtcttacaccccaaatgttactctctatactccccaggggtgagtgtactaaattgagaagtgagtcaatgtcactgtgacctacgtctagctcatgctctccacctgctctatgaactgtagatggatctactaagatgaatggtttcaattggtggtatatttacaagtcacaaatgctaagagaattaattgtacagtgtgagtaggaccacatagaggagtccccggaacctaattattgagatgtcacactgcttgaaactatatagctagataggatgctgggcttcatggtgatttgggtctttcaggcaaagaaggggaactacgcctttctatgggatgtggccgtggtggagtatgcagccctgacagatgacgactgctcagtgactgtcatcggcaacagcatcagcagcaagggctacgggattgccctgcaacatggcagcccctacagggaccttttctcccagaggtaggcacaataacaaatcatttctagcagccttggcagctggaatagaaggaaaacctcctgctatgacataagagccattatcaatgcattgattcttcccatcttcctaattactagctagggaccaatgtgcctttctctatacctcttcttgggccctgcataagtactagggtgaaaagaagaagttcatggcctctttgtaggaagacagcagtgtgggtagaactatgatatatgtagataatatcagtgcagagtcaagcagtgtcccaggaatggggttgggcagaagagggcatctgatatggcccaggacttctcatgggtagtaatatccaatgcacataggagtcagtcagataaatgactaagtaggatctggggaggccgaacagtctctttttaaaagtatatcttcaaagtgtgagttgtccatgtggagatgcaaagtaatagagtcgagaagcactgtctccatctgtagcaaggtgacctgatgagtcctgtggactttggatcaaatttcctggctggatgaaatagatgctgctgtccactggggcaagagatggacctcgcctttttttgttatgagaggccaacctctcatttcgtttcttctccattctcctcatgtcaaaagtaggcttctgggtttctgtgccatcctctgagagttaattaattctgatctcttctcattaatatagggaaactcaggagcattgtggagaaagaggagggatggctaagtagagaggaagttttcaactatgttaaactgaatggatatctccttcagaaaccaatgcagcatgtctactttgttcttgggtttcatttcccatgtgattgttggtatgagtttgtcccttgagcctgcttaggtttagactattgggcatgatcaagttccaaactgctgttctccctcagaataccaatctctccttatcccatagtggttctctgttatagcagtttatatggtctgaatgatctggattgaagcagggagggtagaactgaatgatattggtaaactcaatgcttgttttcttgtagccagtttaccagccaaggctcttgtctcacaagaagtctagccttggaccctcagattggacatatctgacgtggcatcctgctgagggaaggaattagaattgaggtgattgaggaagttctaaaggaaggctctgccttggctcatcgaaacccgacaagaggtggcaggaacattgtcatgaacaaatccgttcagtgccaagcttagggataaccaccagttgcctgattaacacatgaattgcagccttcatgtgttatccacttgaagaatatccatctggagaatatccaggttgatacagggaaattattgaagacatcctactttctaccctgtaattcagggagaaaaggagtgtgttctgtgctttatgctcttccagcatccagctctcctgagttccagtccagcactggaccatgttaccattgtatctgcaaaccctactacctgccctttcctggatttctagactggatcctcttgctcaggatcagctaagcctcaaatgcaccagagaaggctgagaagtagggtttgcaaccaatgtagtaagtattgtgctttcaaaacttggtgaagatgtaggagcagttaagtgtggctttaagttttctccagaacgtcaagaacatgtttcatcccctgctttgccttctggagtagatagagaacagtgataagagagaaagaggtatctttcagttcttcaaattaaaagtgtgaaaaattatggtttctctttgggattcagaatacagtggcatttctgaagtttatgcatggtgttttttcccagataggagtttcagggtgattgcacagaccatcaacctgcaaagatctttgtagagcagatggtaagggagtccataaggcaagtgtaacagcaacacccaaacagccaatgagtctcaagatggtgctcatggatgtatgggacccattagtgggaagatagaggcccctgagctagcactgttaagtttctttaagtctgaaggaaaaaagtatcaatatcctaggaaagaagaaagcagatgttggctagaaagcttggatctctacagggtattcagagagactcgaggcagcaatgaagttaggaatacccagattggatcaaaggaaaagtgaaaattctgaagatgaagaagacagagaagagtcaggagaagtggtgttgctctcctctattaccaatagttgtgttgtatgcttaaagagttgtgttgtatgcttaaggagttagatgttctttatatggctgcattggttagtagaccacagccagtatgtggtctccctcccatgccagtcatctccataaaaaagtggtgtacttcccagattccatgtctttcttgcaagaaataattccccttcttatttttatcagaagactatgtgttcagaagactgtgctgtctgcaatattgtcatgtgtctccatgctataaccaccccatgagctggtagcatccctccttccaaatgacaggcatctgccttttaggggaatgctccagtctttatttctaactttctgttactattagttctagaaggggttctgttgcatactgcaagctcattgtgagctgccttaagctcgaatgtgccttagaaaaatgaacagagctgcttcaaggggaacacagtttgtcatttgaataagggcctgcactgtataagtagtagattccaggcttatccagaatttctgtggttgcctatcccttcagcttaggagtcaagctatttgtttgctttgacagaggctaggatatagatgtaagtgtatatggtgtgggtttatgttatgtgctataacagttttgcaggccacagcatgcagagtgggcattcaataaacatttagcaacttaatagccacttattgagcacctactgtgtagcaggctccacaactattgaataaaggaaaacacctgcaattatatctgtctggaaaatagaagaactggcttcaggaaatggctcttatcgctctagttcctcataaataggaatataaattgttagagtgcacgttaggttagcctcattcttgaagacattttgtgcctatgacttatttgtcttgttgcttctatatttacactttcttgttttgttgtttttttattttttattctgttttcctgtaaattgccatatatacttcctgaaataagatgtgccataaaatacacatacaactatgtggagaaaaggtcagaaaatttaagcagcccacccgatactgcccagaaatgttgcatgtagtttttgctatcctgctttaagctccaggcagactaatctaccaaccccactcaggttctattgtatcctcagatgaaagacatacacacacattagcttatttttataagctctagttcaatggttgggctcttctaagccttctttggcaatcacacccttcttttcactccaaactcagcaccccaaatctgccctcagcttagttacatttctaacgtcctgcctgctaacccaggcacaatcagggaactggggaatggccactccactctaggtctcacatgactggtatcttttctccctctgaagcatggcaaattcttttctcctctcctgcatctgctagcttgcctgcaggaaaactggaagtcctgcctattccacacagctcattggctactagcatctttattgattgatcaagaaccaattggggaatagcgccttcagtgttcacacacagatcaaggcatcagaatcaacccctgtacagaaactgtgagaagatcagaccctacagtacatccagggtcttaccatctcccaggtcagaacttgacacctggagaatagtctgttgtcacaggaagaacatggcctcccagatcactaatggcccagagctgaagaacattaacctttctaattacaactttgggcaagtcaggaagattctttgctgaggccttcaggaaataaaacagatatattaagcgttcctctgcacgcagttaggcagattgaagcactataaatggtttgcccctacagtgttcactcagtaagagggagctcctgcaaagagtgacgtgagaagttggccaatatggccatctgactgtacagctagcaactagttcttatggaagctgttagtattcactggattataacctaatggccactgagatcggtaccctatttactctcagatattgatgatgagggggttaaggttaaaaaattcagaatctggattagaactaatctccatcagcgaagaatcatatttctagacacaaatctctgatttcttcatgctgagcaagtagttcaatcactagcctcctcctggtccctggcagcctgtatatctgcatatcagcttctataacttacagtaatcccaccctactcatcttagtcaccagagacttaacaaaggccagtgaacagctacacatgcagctttcctggccagagcaaagccacacatggtagttagaaggactctagctgctcagttcatcgtgtaacacacacttagctgtggttttcagggacattctgagaacagccacaaaacacacaaatgtacatgtaaatcaatgacctgaggtactgtagtgttcctggcatggccacagtccaagccttttgggattatcattgctctaaatcacttgctagatatttttataatcttaccatggccctttcatcttctgtttgttttcattattcaacaatacattcacaccttggttgacagaacaaatatctgctagcaagtagcttttgttttgatatctactaaacttgcacatgaaaaacatggaaagttgctcaccctattcattagaatggtaaccatgaatctgttaggcttagtgggacttggccctcatccagtagcacacagatgagatcaaaccctactctgtactgagctgggtccttcccagatagtaagaggttactccagggtagatccatgatatagacacatccagggatactctcagactgttgccctttcattctttagatgcagacccatgtatagtacactggttcagactcagacctgtagctgtaggtcctgggaagagactacacaactatccatttaagcttctgcagttcgttaactgcacatacccagagcccaagggggtcgttgcaggcattataagctaaatatatcaccatggaccagactcaaagactacttttcaaatagaaaggcttccatgttttgaatctggaaactaccagttatacctggctggttcattgtgtaaagccctaggaatccacaaaacaccacaatggtattagtcgccatcattaggaattgtcccaccattatgcacccagactccctcactcaccctgttagagctcacacctcagactgcctatttcactgtcttcatcccatgcctcactctccctcactttcctttttacagctccacttctgtgctgtagctgcttaattacaatgttccctttgcaccagacagaatgttcacacatattccagtatcagttgatgagagcctcaaagtgattatgggaaggtatttcacctctccatgccttgatttccttctatgtaaaaataagacaatagaaatcaattccagaaggttggcatcaaagattcagaaagatcttgtaagagtgtagatacacactgcacacagaaacaactagaccaccatgcactgcttcatggttcatcatcctttagtttcactttccctttgtctcctcaaactctttaagcctccagcttaaacccctgacttgtgtgtcttcctggtacttttgcttcatttcctcatgttcaccacaactctgtccttacactgtagacctcatggttttagggatggtgtttgaatcattagatgataagcttagcagcattgagcatcgttcttggaacagtgcagaatcttcttaagttaaatggaataatgaagaataatatgagtcctactacgacagacaagatagaaatgtggagtttctattttttccaaattggactggacaaaagtgttttctagattttggatttatttttttcttccaatttgaaatattttcatatatgtactggggtatcttgggagatggggcttaagtatgaaattcatttatgtttcatatgtatcatatacatgtagacttacataatcttacataatgttttagataagtttgtacatgaacaaagtttgttttattgacatgtaagagaacaaatgtagaatattccatttgtggtgtcatgtagatactcaaaaagtttcagattttgaagtattttggattccagaccctggaattaaggatgagtggctttcagatgttaaactttgaatgacagcagttttatgactgtgttcctactaagtgtgcattttggagtttgcctcattcgtttctgtgtgtcccaagtttatcctgagaatgttctctgtaatccgggtgaggagcctgatatgcattgtccctgaaccactggctcaggagggagaggcatagcatatcatcatgtgttctgagaaaagcactctgtgtgcaggcagggtgcagaaaacactgtggaatagcctgactctgggaattctatgatggctcaagagtaagcatggcaggccaataataagaccagatggctaagctgatgatgtcaatggctatggctcacctgtgttgtatcttgcaggatcctggagctgcaagacacaggggacctggatgtgctcaagcagaagtggtggccacacacaggccgctgtgacctcaccagccattccagtacccagactgaaggcaaatcccttaagctgcacagcttcgctggggtcttctgcattttggccattggcctccttcttgcctgcctcgtggctgctctagagttatggtggaacagcaaccggtgccaccaggagacccccaaagaggttggtgtcttcatagtcttgccatagtctagtggtagggtgtctccctgggccatttatttggtgggtggcttcctttcagatagtatttatctgagtcaccttgtctggacacagcagcattgtatattggggatatatgtcatatttcattttgtttttaaataaacagagaaaatgtagtgggtgttttcatgtttgaacaaagtgccaaaggaccggccaaggccactaaagtcctgtatttatctatagagcaggtacggcgtgggcagcgccagagagcccttccccaccctgccccgctcatgtgcttccaccctgacctggagagaccacctgtagggtaagagaggagccccccattccttcttggttctctttggtgtctcacacagagccacagacccagtgacccccagtaagcgaggcttccctgatccccttgtcgccctgccttttctctctctctcatttttacaaggcatagccttgccaccctgggagacactggagctctgtcctgactaagctctggctacttctctcactttgtacaccaaccaatgctgattctgtcccttgacatgtgcatcgtattgggtatttgttctttaaggccaatttctgatttggtttttgaaaggaaatcctgtgaggtagttcccctaaaagaggtgtcaaaaagtatcacgttgtgatgatcctctgccaatagagacatacacataggcatctatgggacaagcctcggcacttcatacatttgtggtcactgcctgctatacaccctggcttcattaagaatcagactttagctatagatcctgcagaggcttctggagataaatcttaagtaggaagctgtaaagcagctggcattctgtttaaaggcagtcctgaaggattgtgcctggtagtcctagttttgttttttactggaggccaaggggacacacacgttcatcagctggcttcagaggtcaaggagaaaagcaaaataaacggggacaggaaatccaagcaggcgggagaaggcagagctgggtgatctcacttagtctggttgggctgggaactgctaccattgaacagcaacacgagctgctcatcctggcatctgtttctgagatccgccatgattggctgatggctccctcagccatccatctgcaagggagttcgttcatgatgaggaagacaatggctgtcccctgcccctcagactcaccactcacatttcaggcagcaagcgtgatgcttttcctggggatggctggcactgctgagccagtaccaaagtgtcctcatgacatctgtcttcccctcaggcctttctaaatctccatggaaagaaaggagggagggacagtgcaggagggagggttggggtgggggcaggggaaggggnnnnnnnnnnnnnnnnnnnngaaatctggctttactaccccaatggcctttcctgccaatcctaaaccactggagggaagggggaagtttaaggaaaactcactgaaaagagcagtgaatggctctactcaaagttgtattttgttaagtttggaaatgattacactttttcaaaaagttcctgaagggaccatgacttcctattgagcagataacgcgaagccctcagtgttctctgaaactgtggaatcttatcagttccctgaacatcaaaaccaagacaccttgcctactgtcactaccgcaggtctttgcacacaagaacatcttcaggcagggagggtgggtgatcccagagctcctctgggaaggaacaggggagacaggacaggcaaaggagtcattgattcacccattatgttcctgcctgtgtcgttttgtttgaggtcatggctttctcctcagtcagcctctttatttcaccctgtacaaatgtcccataggtcaggttcacaaaggagggttggttgtttgctgtctgtgtacattgcagagatatggaactgtctctcttgtctggtgtgagcagggatgtgggctccagttcattgtgttttttaaactgggaggccttgtctactttcagtttcatccctttagagcccctagtacagtgatcattccaattgtggtcacccagaattagagaaagagagaccagggagggagacagagacagagacagagagatggagagagacaggaagatagagggagtcagaaagacagatagagtcataaataggaaggtataagcaaaggaagacagaccacagaagaccacaagatggccagcttgcgaagcacacattgcttgcttctttcttgccatcacctttccctactttctcacttctgcataaatccgcgtcctctgatatagaggaatacactttcagcttgttcttccacaatgtgggcttccttgcctggctctcagtccaggaagatagaagaatgacagaagacatgggggcagcccagtaggtgctctccaccttcctctcctattcatatgagctatatgagagctttcccctgtttttataagtatccaccatccagatgaagtttatcccatgcttctccttgcttcctttaacaatcttgtctgcatgaacccttcttttccctcccagaatatttcttcacctcttgggtggctacaacatagctcaccagcctccatcctctagattgagctgtcctgacattagcaatgagaaccactagagtacagaggggccccatcctagcccgcacatagtagggctacggtgttggggtgagtcatggttagttaagattattgtggcttgaggatgttagtgtggagagatgagaaattggtagaaatcattgagctggacgtgagatggaagagttgtattttggacaaggtaaacaaagggttatcaggaagtaagggcatgaaggagaagccagtagaagaatctgaggaaggaggatggggtctccttccaatgtatcaattccagggtgaggggtttgaacctgtcatctaggagcagagaatagacccgaaatggcaatattttagaattatatctttaaaactgtgataaaataatgaaggtgtttaatttacatccctctcacattgctgctggcccatgttttatagagcagcattgcaattagatgaggctatctggaaactcttggaatgtttcgttttgggatgccggctatatttcttaagagctgaaaacctgtctttgggtggagcccaagctgtgtttaatgggttgtgctgcgatgtcttcagagtttagacacctttttgggaaggagtagtaatgtgcaatcaacctcttaatattcatgtgcatttgagctcatattttttcgggggaatcagacaattatgtagttacccaatgcaggttagtgcaccaagctctcggggatgcagttaagagccacccgctagatttatgggggatgtggaatcgttgctctgaggatgaaatattcatgaaatacagatgagaactgcacaaatgggagctgacatgaagagtgagggatgaatcatccatcactgggctgcaagttggaattctggtttcttcctgtcttgcttgccctgccccatgtctccaaggcagaggggaactgatggaggccaggatagctgggcagggggagacagtttagcagcaaccccttccttctgacctagggaccagcatctgtgtggatgcccctcaaggctgcttccttatgggtgattagagactaggagacctctctttaatttcagaccctgccttacctccactcctttgctttacaaatagaacactgtcttcttaacccttatcaacaacatttaaggaaggcgtccttattattactcagcaatgacagaaaacaaggctgacacatggatgatacatctgcttcctagcacccaccacctccttaggtgggcttgtcacagggcaagaacactgggctttctccaggtgtacagggccattaatttctacctaatgttttctggaagatttttaaaaatatgagatgagactcgattcttccttgcattagattctagcaaagcatcccttaaccctggttttttttttttttttttttttttttttgtcttctgttgaaaactgagactagctgtcaggcagtttagtacattacagcaattagtccagagcctcccagtaagaaggcaaagagcacctatatactgctgagtatcttagaaccaggtccctgatggagccatctttgcctgtgaccaccacccatctcctttcaggcctccagtaccttcttacctctgcatctgaattgccgtgcccactctctggaagacaggagctcttgttagggggtgatgaatataattgaggtatcgaacatttcctatatgccaggaaccaaggatgaatgttttaccaagaacattagctcatctggtcgtagaagctcaaatgtatttattgaatgaatgaaccagtctgggctcctataaagaaaatgttattaaatgttaaattgttgtataatcattgcagctggatcaatggctttcaattctggctgcatatcagagatgattaattctggaacttgggctcagtttccatagagttagattaagaagatctggaaaactataatttacaaagtctccgcatttgtttctgatatcctaccaaggattaaaactgtcgatcctctttctatcaaggtgaggaaggtgagcctggtgtggtaggaaagaatatgagtgctggatctaggtgggcgtgggtactgttctcagtgctccactctccatgggtcaccttgaacagatctctccagtgcaagagtctcagctcattcctgtgggtcctgctcttcccatctggtgtgtgaagtgattgttccctctcatttccctgccaaggaatacttgtgagggaggtgactggacactctcccacaatgctttaatgggtgaccaatcatcccctgggctcattgccttgtcttgaaattcaacctctttgttttcacctaatcacaacacccagatccaaactcaggttctagcactctcgaagaggctggtgttgttcccatccattgggagtcagtgactccctggtgggtctcaatggtagcaagaggatgcttccagcaaccatccaggtcagacagggaatccctgaaccctagttttgttcctgactactttaaagaaggaactgttggattccaaacaaagtcagcactaatgagtcccacatgtaacaagctgttacatagatgatagtttagtaaattacagtttttcaatacatgaaattatttccacgttggtgaacagcgacttaataacagaattttatctctgcctgagagaggttctctggtaacctctgtttctgcatctgccatcatgcttaacatgggatgaggaatacagggctggattccaggcaatttgtgggtaaatgcagtcagtgaagcttacgtcatattcagggatgtttgactaggtcagttctctatggtatattaatgaaaggagccataagttccaggtctctttccccaactgtcattacctgtttgaacacagaagccttggggtaatgaggatgtaaactgatgtagttcacataaaacagtccattatttgatttgcataacattgtagaataaatcattttgtctggaaggattgttattcaaatcgctcttgccactgtccctgcttaagctgattacttccgcctcctttttccttggccagagacgtacaagctccgaatggacatgaccttgcacatgctaaatctgtagccccaggtgataccagagaacacatcttccaaggccccgaccacggtgcttttgtgcctcttgcccctcagttctagcttatagactaaggagcaggcataggcagcttaaggtgtggagattctgaggcaggctgcattcattttccagggaggtcaggatgcatttagagtagctctgctcatttttttcatagagttaaccaaccagtacagaggactcctgatggggccctcttctcccagggcttagcttaatcttggtgctcctggggtaatagaatttgaatagaaagaggtcctactgataggagaaagttggattcttgacagccgtttggcatgggaagctctctctggaaaatttgttcaattggtgtgaacatgttctgtgtatcctgacatggaaaggttagaggctaatagataaccacaattgggagttgatttgcactgcacggcttcacactccttgcaactgattcatccatccttaatttgaggcagggaaaaatacactaggttaagaaactattcaagatcttactctcagatatacaggagtagcaagccaacacaaatcagattcgacgttttagttgttggtggcggtggtggtcatggttttggtggtggcagcagtggcacatgtgcgtgtgttgcacatgcaggaccttttaattttatgtaaccctgtttgtcatatcttgggcctatttttttatgctattggggttctgtcagaaaaataaaaacatgtgttcctacgtattctcatgtgttttgtttttgattttttcttttctgtttgtttgtttgtttgtttgtttgtttacttatttatttatttttagacaaaacttgaaggtgggtgggtcctgaggtgaaggaagatctcagaggtgttgaagaaggggaaaggttatgatcaaaatgtattacatgaaattctcagcatataaataaaaataaaaagaaatatccattccttgggttagtctttatcctaaatacttggatggtgcatgacccccccccccagctgcattaaaggctaagttattagctgtgccctacctccaccccacatatacaggaatagcaaggcattttatgctttgaatgtcagtactgtaggcattgaactaaaaggcctcccctgctcacatttttctccataggactttgattggaataccccaccaagctatatctttttctctggcactaggtagaaagtgttgtctctttataagagattctcaaattcctgtatccctagggcattcatatacaggaagttatcctttctctccaatgcctgaaagacaacacatgcctccagagcacctgcctgggccaggatttagatgatgttagtcaaatgtccaggctttccctatagctgctcagaatccagagttaatagatctggaaccaaaacaacttgcttacttgcctattgcaaatgagtccatggtacaacttaattttcttccattccaaatgggtatcttatagtactgaagagaaaacagaaaggaagaaaaattgcttatcgaactaagcagttctttgaagggagctcagaaacatcactcagtagctttcttcctatggaaaccataggctgtagtgcaggcaactggctcatctagacttctacaagttttgatggctgcaagggagagaatattgtttcctcaggccctaaaagcatctgaaactctacccaagggtctccaccttacacccttccttgtgccgaggatggagatggtgtataaataccttcaccagccaagttgtggcactgactttggttagggcagacaaaaggttcatgtcccatagccaaagctgcataggagatcctagcagcagtgaaaggctggaggtccaagcttcgtgatgagcagagccaggccttgtccagatgtcccagccctgaggccacaccacagagcagaatgcttggtatggcggaactgctttgagatgaaactcccaccactctctgtctgagtctgtctgtctagtggggattgttacctgccactgccaccctgtcatacaatgaagatagccatttacacaaaactctccaaagcaatccaactgtatattatttaagaagtcatcaacagtgatagggcccaaagtactagagcccaaatattaagtataaaatactattgtaaaagttttaaacaaagaaaggaaaaggttttccttatataaagaaaaaaacccacaaaaacagataaggcacacactgaggagaactttttacagagctccctcaaccctggtatgaaataatttaacaaataacttgaattcggtttgctatatctataggttatccttaatttactgtggttcaactatgatgtttgacctttaccatggttcaaaagcaacatgccatcagcagaatttaatccttcagatttttagtcttttttttttttttttgagaaagtgcctatgtggtcctattttctgataataatgagaagcagaagagagccaccctcctagacagctgcaaagcatcagcagaaagcaccaatcctctatgccattgttgctaagtgaggatgcctggtagttaaggtaactatattgttgactggtaatagtttcaatttgcagtaagactgttatgatttaacattataagttgatgcacatttacagcttttacattgtggaaggagctgatagaggaaggtcatgaatggtcttgagctaggcagaacaaagggtaacatctccacccatttcccaccacttttcctctggcgttggctactcagaggtattcttatctttgaagtacttcccagcactgatgagctaagttatatctctaggaggctgcacatcactggaatcatgggtatttttcagtggctattcaattacttccaatgtcatttccatttatgacaccaagccaatttcggtagtgttccctcaccctctgaccagtctgctccctgtcattcagtttcttcctggcctgaaatgagttctttattgttccatggaagttgtcaattttcttgtcttaggagatgttctggaaatcagagtatgtgtcttaccagaagttaagaacagtatgccaagccgggcagtggtggcgcacgcctttaatcccagcactcgggaggcagaggcaggtagatttctgagttcgaggccagcctggtctacaaagtgagttccaggacagccagggctatacagagaaaccctgtctcaaaaaaaacaaaaaaacaaaaataaaaaacaaaaaacaaaaaaacaaaaaacaaaacaaaagaacagtatgccagctgtgaactcatggacgtttaggcagtaatgatttacttttctataaggcagggagtgatgacacaagtagtgaattacagggtattttagttctttgcccaggtgagaaataatgacttgactcttcctaatattgagtttgtggttggcatcttgtgaaatgaggagaacttaagccctttggtccaagtggcttcctgatggggaggccctgtcctttatccccataggagctcaaagcaatcactggggtaacctcggctttgcatggtcatgtcttcttccttttggaagcatgccaaggcttctacatctcttgatatatttaaaatacctacaacataaacaggttctattcctttctctgacatatgctttgagcactagagaactggcaagattgtattttagaaatgagctttgacacggtatttttgttggagtctgaaatcagaaagggccagatgtagccaccatcttgcctgaaatgttggtatccagagagtcacaaatggcgctgcagctcctacccttatttgggagatgatatagatcattttctggacagttatgcacttcacgggggtgtgagggaggactagggaagcagatgacatcttccttaagctctctagcatagtgaccaccttaattcgtttgaacattgataatacattagtttacttgagaagaattattgtagtcattatattctttatttgtattcttcaacagataaataaaccaaaggtcttctgtcatgtccccccactgtggtgagacagggtcaacggtgaggctacccatttgggaagccataagtcctcttgacacctcttgtccttgctcctccttccacttaagctccaatgtcccattagccgaatgggaatattcttcctcccagggatgaactaaagattctccacagaaaaaaataggttgccaggtgggacagagttgctttcccacagcttttgcacacagactgcagtggttctaggagtctctaatattcatggggtttgtggcatgaagcaatggcattattctaaacccgatcttctgtgtgtaaggcaggggtgacagtatcaagcctgggagggatgtggactcaaactgcaaatgcatggggcacattaggggatccagatcatttcctctattttcctggcattctatttatctcctcctgtgtctgacatctcttcagagcatcgtgtcatggggttgcccctgggcatgtcagggatcctcagctgagtgtggggtgtggaggatcttctgatgcctgctgtctgggtcattgctatatacagattagtgttctagtgtatggattcccctgatagtcaagggttggccatctgatcgagggaaggtgggagcaataggggaaactgtatggcaagctcaataggcctacctcctggtttccaaattttgcagccagctgtcctcaacacactcttaggatgtcctttgacctccctgtactttctctctccaggacaaagaagtgaatctggagcaggtacaccggcgcatcaacagcctcatggatgaagacattgctcacaagcaaatttccccagcgtccattgagctttctgccctagagatggggggcctggctccaagccaagctttggagcccacgagggagtaccagaacacccagctctcagtcagcacctttctgccggagcagagcagccatggcaccagccggacactgtcgtcagggcccagcagcaacctgccactgccactgagcagctcagccactatgccctcaattcagtgcaaacacaggtcgcccaatgggggactgtttcgacagagcccggtgaagacccccatccctatgtccttccagcccgtgcctggaggcgtccttccagaggctctggacacctctcatggcacctccatctgaccgtgtcgcctgccctcctgcccgcccacccacccacccgaccagcagagctttttaatacaagaaaatgacaacacagtcacacacacacacacacacacacacacacacacacacacacacacagactctttcatttttcttgtacatacgtgtaaataatgacagaatggagtggggtaaaagtgtattttgaatattcccaattttcgaagtcagtaaaaaaacaaaacaaaacaacaaaaactgtatgaatgactttgtaaattttgttctatatgaataaaaaggcaaattacttgtgatcattctgaagtgccaaaggagccccctgttcctgggcctttctgagggcaggaagaaccatcggagaagaagctcctggctgctggggagaaggaagacatggaagagcccccgaatgctgcttgctgctgtacccacagctttccttgtgtccttgtcttacaagcccctcattcctccttcagtgtccttgggtaggttcagaatgtgtctgagtctggagcccatgttgggtgggcccatctgttccctgagctgtagggcaacctgccctagacatggccctagacaatcaggctcaagatggtaaggtcactgtgtgtcacagtgtgtagcatgcaattgtccccagggcctcagaaaagatgcccatattgaggtcacaatctctgaggctttgataccaatgtgtttgaacagcatattgttggtcttttaaaaaaaacaaaaacaaaaacaaaaacaaaaaaaccctctttttctactcagaagaatcaattagaagagactatataaaagaagggcagaccccatctagttagaggtctgactggcctgggtgggacatctttggggagaggtttgagggatggaggggtgtgaaaccaggtaaagattatttgcttgaattggcatccacagctctgagtgagagaaagtgtggttacagacacagagagtagaagcatcagagtcacaggtaaaggtttctatataaaagtgttgatagaagtgtctccacatgatgggcagactgaggataaacaagagggactacatagagaagaagcttgacagttttgagaaacatagctgtgtaatgtttgaagcaaaagactcgtctgccctaatgaagctatccagaatccttaaagacatggctttagctctttatgatgtcagctaaacaggaccaggtttcggcacaagccccttcttcagactttactgcccttttttccactagtagattaaatgaaccagaccacagcaggaatccttcaagctaaaggcatctgacatcctctgagatggtaaatttgcccggaagtcctgtttcataaaacaaggctaacctaaggatccatatattgccctttgtggggtaactaaactgtagaactggaaatgatccatcaaaagtagcctgagctgtgccactaaaagtccctccctccacttttgaaaatccaaagtgtctctagatgcctacattgttaggatgtagaatatgaccccatccagcttcaagggtatgggactcaaccccaatcacaaatcaaggtgtagagatattggagaaatatgaagtcctatcagttgctgcttctatctgtattcatatagagttagttgagagatatattaccatgagggtgaaaactggcccaagatgaatttacctccccaaatccataatgatgttagtgaggatgaaagagtggctatatcacacaatcagctaaaagcaccagatgaagagggtgtttgtaggtatgttacctttggctactgggatgccatgctgctagtattactaaagagacctgttcacatttctccagttagtgtgtagagcttggagacaggtgtacatggcaaagcctgggtgggctcccatcaccctaacaatgtacaggctttgctttcatttcatcaacatgttgggcaacttgcactggaggattaattttcatatatataatctctctattttaaaaaatcaaactctggtctcactgccttatcttacacctgtctatatcccaaagatgacttagtttctttggtatatcatggatatggatgtctttggttcagagtaagagactgtgtgtgtgtgtgtgtgtgtgtgtatgtgtgtgtgtgtgtgtgtgtgtgtgtgtgtgtgagagagagagagagagagagagagagagagagaatctttataggaacattgtaatgcctcgggacattagtaacccctcacagtatttagtcaccgtatttatgtctttttttttccctacccttggtatgaggggaaatgattgatattcaagcaagtaaaatagggggagacaacaaccatagccagattctttccagctcagatatctgtgtcagctcagaatgtatctttttcatgctttgctctgtggatttataactgtttagactcttccatacattttaggtatattttgtgccttcagacactgcaaataataatcagcatttggattaaagttgtttaataataaaacatgtctactcctaatgctcttattctctggcatgaggtgtactcttgtctctttctgggtgtgctgcagccaggtattgacttctgcctgtggccatgcacagttgttggggaactttactcagggattcatggggatagaccacgtcctctttaccctgtgtatatctgctgtccactgataccagacagtagacagtaggagaaaagactggacagcaattccaggctttggttagtcaatcaatttcctttaaaagattgagttcttggaaagctcttggggagaattgggccacaacacacattgcatatgggcatcatttctcatagctactttgcttttcttatctccgtgttctctctggcctcagatcactcatccatctgcatgcttagctctcatgggattgctatttgccttctcagtgtatgcccttctctgtgccttcctttctctcaagggcatgccctatacttagctgtctccctgactggactccttccctacaaccttcctgatgtttgtatttcccagccttacctacatttcagtattctctttgatatctggagcttcatggagaaaagaacattgggtaagtcgggatgatccaaggaagccaattttcatgaaaaaaggactcaatttctggaaacccaaagaagagtatcgggcccttactcttccagctttgaagaaattgtaagcttttcccatatggggacatggttttcagacaggaaatgtggacagagtagagactctcccacattatgtacacagacagggccagctataagaatactctaaagttctctgctttttgcaaggaaaaaaatgaagccccactcttaaactatataccatacaaatgaggtcaggggaaagttaattctctacttagtcaagttctgaaaaaaggagaaatgacgtacaaaaaaggggaaaggaccaccaggtctcacagccttgacacagttggtatttattttctataatactcacatctgcttcttcatctaataacctcttgctttaataattccaaagaaaccatattcaatatttcaacattattaaatattataattaaaccttgagtataattaagtatctcacataataaaaggtatggaaagcgtctactgggtaacttggctctcctgtgcctttaccttcataggttcctttttcagtaagcctacattttcaaatattagtgttcacgaatgaacacccatatcttaaagccttgtactcttagatttgacaagacaaaattagataaagacttaaaaaaaaatagactgaaaaaacccacctttcctggctatggatatggtaaacaaggtaacattccttaatgcagcactttctaattcttaaaacactctctcatttcataccactactgatttttagcaaatgaatttatacttgattcttctcctcagacaaagagattctagataataactcctttgcttgtcagtaatcttagtcattgctttattttttctctattagcaatgttttagtcagaatagataagttatgaaaggactgcacatagccccagtatagtaggtgagcttctagacaccacctatgaaaggaaaggacaactatcagtgttagctgacaaccctcaagccccacagcctgaaccagatactgagctccagtgacagcagggatcttctttgcagtgagaacagctcaagccatggaaaggtgaaatgacaacggtcagattttgaaagaaagactatcaaacagtccccctgaacacttcgggggagtagttcaatggcattcaaagagcagttaatgatggcagattctagcgtggagtttccaggataagaaagtgtcatggcacaaagaaaaaccaagtattcaccaataaattgacatttatttacactcaaaaatgtacccagacacattgattggcatatgtgcatactcaggtataaggacttagatccatgcagacatgttcatcgtgtcagtacatatgttgcatttaaaaagcagagtcgtaggcttgagtactgcaggcagaggagctatgctcaccagagctggaaaacagggcccatggatgctgctttagggcgtttctgcccagtgcacagcttcagtgtaatagtaaaccaagcagttccatgcagtcaactgctaaggtacaaggcttttctctgaaaaagtggcttcatccctgctaggcatcttggtatatacagccaaccctcttgttattaattgcttactttcttactctaaaattctgattttttcaggtcagcgagatggctcaaaaagagaaagtgattgctgccaatccttgaagacctgagcccaatctccaggacaacctagtagaaggaaagaaccaactgttctttccttctgacctccacacttaccatggtgtacacacacacacacacacacacacacacacacacacacacacacactaaatataattttaacaagtcaacaaataatttaagaattctgattttcttaccagaatctctgaaatatgaaaaaagccaaatcattcttcaagctatctcttttctatggtcatattcatatcagtaatcattttattggtattgtatccatttccagggagcctactatactttatatatggaagcattctcttccttttatcagccattcaagacagatattgtcaaagggaggaaaacttaaactgaaaggtgtggtacctggttagtgaatatacttactctcttgaggaggatgctgttatccactggacccaggttgatcttctctgtcccaaaacatagtgttatgggcaccaaaaggtgtttttagcatctacatataatgctttctctttggtggcctcagagtgtacaggcaaaggttatggcaatggctaattttggttgccaacttatactgagtagcacctagattagtgcaacatacttcaaagtatactcttcccaaaggacattacctaaggatgaagatatgctctgcatatcagtggtcactttgctagattgggagtctatatttaacagagaaagaaaaagaggaaaaaaaaaactcactctgaagtgagtctgttactctgtccttagccactttaatggatacggttgtgctccattatactcttttatggttgactgaaactctgagccctaagaagtatttcttctttttaagttgttttgtcaagtattttgccacagcaatgaaatatctaacacataaaattggtaccaaagaaatgaagtcattgtgatgaaacctgaccatatgattcagaagtctcaggaaaaagtttgttgggggtgaggtgtggtaggggtgggtagcacatggaaaagcttcaagatgatggatagagaatttctagggtgtttggagaggagcttagcaattctgatgggacctccaaagaccagaattgcaatagggttgcaaaccgaaagcactatgtttgtgaagtttcaggtggaggtgaagactgtggcaggctggaaaagaagctattcataagctggtaaggatggtctgcactttgtctttgtcacaagaccttgttaaagagtagccttaaaaccgaggagctactttatttgatggaagaaatttcaaagcacgccagcattcaggctgccacatggatgctgctggctgtctttagccaggtccacagtgataatcatgaccaggatgtataggaaaaatctgaggactgctaaggtgattcattggtaaaagtgcttgccaccaagcctgataacctgaatcttattcccaggacccacatagtggaagaagagaactaactctcacaaaaatgtcctctggcctctacaagggagccatggcatacacacaatacacaataaaataagtaaaatttaataaaaaacaacttctttaaggaatttgaaagcattcattttgactaggaaagaagtgaatgtaaagttgggaccaaggaaaatgtgtatgctgaagagactaaggccatgataaagaagccaaccgaccactttgccctggaacagtgtggctgatacctgagagcatctagggaacaggctggagtccacccatcttaaactcaatgatgtagaggctttaacttttttgcaaaatgacttggttttgaaaagagagctctgcagacacctgcatgcccagggccatctagaaaagaaaatgttccctagtattcagcaactagctattcagaaatccctacagctgtgacccaagagggtctaattactgctcaacctagttagtgacagaccttaaagtcatggatatttgatgttaacttttttgcgtgtgcacaattcaagagttttgaggtcatataggctatccccaaacttcccagagagccagacaggcaagcaaggaggcaggactcctgcaggcagtcactgatagggcagtgtgaaaaggaaaagctgaggtcaaggtgatgacaacagacattagccttggcaggatcagggaacatctgctgaagaaatacaggcagtgagcatgcccatcccaagagaggggtcatatagatgggaacctgcaaggccatagaggcagggctacattggaggctgggactcatactatgtcataatgtactccagattccatccgtgaggctttgagaaataatgtttttcttgctggagtttggcattccttttgtctcacccctaatttctgttgagagtgcctacactaatggccattttcccttttcttcttttattaaatacatggttccagcatatggaccaacaccatcagtactcttggtacatctttcttcttagctcaacccttttgcaaataccctaatggacattcttgtgtactccctttgtaatgagagtgtgtgggttatgccatcagatattgaaaatatgttatttgcttctaactaaacaggggcttatgaatgactttaatcttagagaagactgagaatgggattttgaacaatgttggacctgttaagatgatagataattttgaaaaggatttgatgaatgtttcattatgagatggacattagcatattgggggcacaagtgaaaggggaaacctatagtctctctctctctctctctctctctctctctctctctctctccttgacatgttgtatactgccttgctatgcctcttcttctctgccatgatagagtgaaatctctgaagcaatgggcctaaatattaacccatttctcattatgttgttttgtttaggtgttttttttttccaataaaagatctgaccaatatagcaagaatccatttgtatcttataatggctaacataagtaaaagcctcattactgtcctcaaagttgaaacgggctaggtatttttctcctggaggcttcctcatccagaagaggcatcagagtcttccaagctttacccagacaatgagtggttcctccaagtgtctcttattttcttcttaagaagtgccctttccttctctagaagaaactatgttctactccacaggaaaccccagggtcctccaaagacattgaaattctctttcataataggaattccccctgaaggccccacagagaacctagaggtgccaagaatcctcaaggaggttgtctttgaacatgctgagcacatcccccacccccagaatggggtttcaaatctctctatgtattcttaaactccttctatcaaagctctaagttaatgttcataaatgttgaatattaggcaagcccctgcacctcacagcccctccctgcattagtgtctgagtataattccgttttagttggtagtcatcagaagtgaagaatagaacggtttttacaagtgtgagagaggtgtgggaaatgcaatgacccttgggacactgctcccactgtcaggctgtatgggaattggccaacagagggcctgtggcgcaattccccaacaaaaacaggtggttcacaatgagatatggagatacgtgaatatgaataaattacaatgaactgtatgtattaaaatgtcccaatgaatctcatattttgggattccaagttataaaaagtgataaagtatatgatagtaaagtctagaagcctctttctgtaacttagattgacaacctgagcatatcctagcttaccctgaatctcattgtttcactcagataataatgataacaatctcattgtttttattctatggttaggaactgcaaaaataagtagacctcagtgagtgctttctctgtgccaggactttccatttcatctcactggatcttactactgtcatctatggttaccagtgagagaaaatgaggttcagagacattttctgattgtcatacatagtatattagtgaggttggtggctataacaaaatgccagagactaggtggcttcagacagcagaaatgtatttcaccagttgtagtgtttctagtgagtgtctatttcccagctcattgttgttacctacttacaacatggagatttattttgtgagttggtgttcccatttatggcctctgggggactgtctcctaatagaagtagtttgcggacttaagatttcagctcacaaattttgagaggagctgaaggacagagacaccaggcaccttcatagatgcaagtgtcagcaccatgcctggaacacacgggctcttgttattttccttggctgggctcctaagcaagagaaataggaaaatatatccatgccccttgggtgaaaatatattacatatcacatatcaatgtgtgacctggctttacattttgctttggactttaaaactgtatgactttttcaactggaatggtccacaactactaaaatacaacctcctcagtatacaagcttctgtcctctgacaacttttatggaaacttagcaatcccaaatggcagtgtagacatagacaagagaagctgcacttcccctacttcctggaagtgaggggtttttcttttcctgcatcagggtagagcctagtgaactcttatgagaaataggatagctttttcccatacagtaagtcagactagaaccagaaagacttcgccaaaaatcttttgtcactaagcacctgagtatccattgtcctgattctgtaccctctccattgtcttctcagcataggatgtttctggtgccttgagtttgtttgaagttcttgtaaggtacctttctaagttcgccctctcagatgagtgttcctatggtgatttgcccacccagagccctcgtctctggacataaagtgtcaatcttggagctcagccaactatttcatctctgcatttcccatgcagagtactcagacagaagctacgagtgttctatagggataagaaaaagcagtgttttttcttcaagactcagaactggtgtgctaaccttgggcctcatccttgttttagtgggatctcacccagtgagatactggtggggtatcagtcagttccttctt

SEQ ID NO: 2 - DNA, 3179 bp, Mus musculus
cgctccgcgctgccctcggcctcgccccgggcccgggcggatgagccgcgcgccggggggacatggaagcgttgacgctgtggcttcttccctggatatgccagtgcgttacggtgcgggccgactccatcatccacatcggtgccatcttcgaggagaacgcagccaaggacgacagggtgttccagttggctgtatcagacctgagcctcaatgatgacatcctgcagagtgagaagatcacctactccatcaaggtcatcgaggccaataatccgttccaggcggtgcaagaagcctgtgacctcatgacccagggaattttggccttggtcacatccacgggctgtgcatccgccaatgccctgcagtccctcacagacgccatgcacatcccacacctctttgtccagcgcaaccccgggggttcaccacgtactgcctgccacctgaaccctagccctgacggcgaggcctacacactggcttcgagaccacctgtccgtctcaatgatgtcatgctcaggctggtgacagaactgcgctggcagaagttcgtcatgttctatgacagcgagtatgatatccgtgggctccaaagcttcctggatcaggcctcaaggctgggtctggatgtctctttacaaaaggtggacaagaacatcagtcacgtgttcactagccttttcaccaccatgaagaccgaggagctgaatcgctaccgggacacactgcgccgtgccattctactgctcagcccacagggggcgcactccttcatcaatgaggctgtggagaccaacttggcttccaaggacagccactgggtctttgtgaatgaggaaatcagtgaccccgagatcctggatctggtccacagtgcccttggcaggatgaccgtggtccggcaaatcttcccatctgcaaaggacaaccagaaatgtatgaggaataaccaccgcatctcctccctgctctgtgatccacaggaaggctacctccaaatgctgcagatctccaatctctacctgtatgacagtgttctgatgctggccaacgccttccacaggaagctggaagaccggaagtggcatagtatggcaagccttaactgcatccggaagtctaccaagccatggaatggagggagatccatgctagacacgattaaaaagggacatatcactggcctcacaggggttatggagtttcgggaagatagctcaaatccttacgtccagtttgaaatccttggcacaacctatagtgagacttttggcaaagacatgcgcaagctggccacctgggactcggagaagggcttgaatggcagtctacaggagaggcccatgggcagccgcctccaaggactgactctcaaagtggtgactgtcttggaagagccttttgtgatggtagctgagaatatccttggacaacccaagcgttacaaagggttctccatagatgtgctggatgcactggctaaggctctaggattcaaatatgagatataccaggcccctgatggcaggtatggtcaccagctccataacacctcctggaatgggatgatcggggagctcattagcaagagagcagacttggccatctctgctattaccatcaccccagagagagagagcgttgtggacttcagcaagcgctacatggactactcagtggggatcctcatcaagaagcctgaggagaagatcagcatcttttcccttttcgccccctttgactttgcggtgtgggcctgcattgccgcagccattcctgtggtgggcgtgctcatattcgtgttgaatcggatacaggctgtaagatctcagagtgccacccagccacgaccctcggcttctgccaccctgcacagtgccatttggattgtctatggagcctttgtccagcaaggtggtgagtcttcggtgaactctgtggccatgcgcatcgtgatgggcagctggtggctcttcaccctcattgtgtgttcctcctacacagccaacctggccgctttcctcacagtgtctaggatggacaaccccataaggacatttcaggacctgtccaagcaactggagatgtcttatggcactgtccgggactctgctgtctatgagtacttcagagccaaggggaccaatcccctggagcaggatagcacttttgctgagctctggcggaccataagcaagaatggaggggctgacaactgtgtgtccaatccttcagaaggtatcaggaaggcaaagaaggggaactacgcctttctatgggatgtggccgtggtggagtatgcagccctgacagatgacgactgctcagtgactgtcatcggcaacagcatcagcagcaagggctacgggattgccctgcaacatggcagcccctacagggaccttttctcccagaggatcctggagctgcaagacacaggggacctggatgtgctcaagcagaagtggtggccacacacaggccgctgtgacctcaccagccattccagtacccagactgaaggcaaatcccttaagctgcacagcttcgctggggtcttctgcattttggccattggcctccttcttgcctgcctcgtggctgctctagagttatggtggaacagcaaccggtgccaccaggagacccccaaagaggacaaagaagtgaatctggagcaggtacaccggcgcatcaacagcctcatggatgaagacattgctcacaagcaaatttccccagcgtccattgagctttctgccctagagatggggggcctggctccaagccaagctttggagcccacgagggagtaccagaacacccagctctcagtcagcacctttctgccggagcagagcagccatggcaccagccggacactgtcgtcagggcccagcagcaacctgccactgccactgagcagctcagccactatgccctcaattcagtgcaaacacaggtcgcccaatgggggactgtttcgacagagcccggtgaagacccccatccctatgtccttccagcccgtgcctggaggcgtccttccagaggctctggacacctctcatggcacctccatctgaccgtgtcgcctgccctcctgcccgcccacccacccacccgaccagcagagctttttaatacaagaaaatgacaacacagtcacacac

SEQ ID NO: 3 - protein, 1003 aa, Mus musculus
MEALTLWLLPWICQCVTVRADSIIHIGAIFEENAAKDDRVFQLAVSDLSLNDDILQSEKITYSIKVIEANNPFQAVQEACDLMTQGILALVTSTGCASANALQSLTDAMHIPHLFVQRNPGGSPRTACHLNPSPDGEAYTLASRPPVRLNDVMLRLVTELRWQKFVMFYDSEYDIRGLQSFLDQASRLGLDVSLQKVDKNISHVFTSLFTTMKTEELNRYRDTLRRAILLLSPQGAHSFINEAVETNLASKDSHWVFVNEEISDPEILDLVHSALGRMTVVRQIFPSAKDNQKCMRNNHRISSLLCDPQEGYLQMLQISNLYLYDSVLMLANAFHRKLEDRKWHSMASLNCIRKSTKPWNGGRSMLDTIKKGHITGLTGVMEFREDSSNPYVQFEILGTTYSETFGKDMRKLATWDSEKQGSLQERPMGSRLQGLTLKVVTVLEEPFVMVAENILGQPKRYKGFSIDVLDAKALGFKYEIYQAPDGRYGHQLHNTSWNGMIGELISKRADLAISAITITPERESVVDFSKRYMDYSVGILIKKPEEKISIFSLFAPFDFAVWACIAAAIPVVGVLIFVLNRIQAVRSQSATQPRPSASATLHSAIWIVYGAFVQQGGESSVNSVAMRIVMGSWWLFTLIVCSSYTANLAAFLTVSRMDNPIRTFQDLSKQLEMSYGTVRDSAVYEYFRAKGTNPLEQDSTFAELWRTISKNGGADNCVSNPSEGIRKAKKGNYAFLWDVAVVEYAALTDDDCSVTVIGNSISSKGYGIALQHGSPYRDLFSQRILQDTGDLDVLKQKWWPHTGRCDLTSHSSTQTEGKSLKLHSFAGVFCILAIGLLLACLVAALELWWNSNRCHQETPKEDKEVNLEQVHRRINSLMDEDIAHKQISPASIELSALEMGGLAPSQALEPTREYQNTQLSVSTFLPEQSSHGTSRTLSSGPSSNLPLPLSSSATMPSIQCKHRSPNGGLFRQSPVKTPIPMSFQPVPGGVLPEALDTSHGTSI

SEQ ID NO: 4 - DNA, 788759 bp, Homo sapiens
  misc_feature (1)...(788759): n = A,T,C or G
ttaaataatgtatgatagctccatggaatagaactgtaatcagccataaaaaaaaatcacatttttggaagagaatttcatagcagagagaaatgctcacattaaaatgttcattcattcactaattaattgatttaacatttattgagtatctttgagacatgccaggtattcttttaggcactgagaatacaactgtaaataagataaatactatcgtcctccttattgggctttccttctataggtggagacaggcaagaaagaggtgaaaaataatttcaggtagtaatatttttgtctgtttctctttcaaaattatacttgaatagaaaaaaggatgggaagaagagcatcacaatgtcaacggcggttatttctggttggtggtatcaggtaggatttgtgttaagttacgaaaaactgagaaattcactgcagaagcttataaagaccagggtctgattggctcctgtgtcctgggctgataaagcagcctcgctctgccctcctggaacgcaggctgtgcatgccctgcttggcttctgaaggtcacaggacggcaggctttcctccgggtctcctgtctaccttccagcaggaagaagggggaaggcagaggaacaaactctttctcctccggaggctctgccttttattttatgtgaacagagcttcagccaaggtctcattggtcagaatgggccacttgggaagaacatggaggcagtgtcatgggttatcatcattttcttcttcacattttctggcattttctaaatcaaacaagacattaaaacaagcttctgtgtgtaagaaataaaggactttttgtgttttaagaaacaaggttggggtggattgctatgtgggaatggagggcagagggcaggcagttgcagccaggctcagacacagctgctatgggtgcggcggtcctggaggtctctctcactaatttccatccgcctgggtcctgtaggcccttgcaggctggcgcagtcctcagaggacacggtggagtgcaggaccatggctgtccctgggagggccttacctgtctgctggctgccttgctggctgccctaactctctctgtttgctggtgtccaggagggctgtgtggctgctggggtgagcgtgtgcagcctgggctcatgctgggctggctggactcactggccctggggactttctcccaaaaggagctggggtttgttccgatgtgcagggctggtgggccatgtcaggctaatctcagtctgcgtcctggcctcttcattgtgttcatttcctgtggctgctgtatgaaatttcagcttctggtggctgcccgcgttccttggcagggggccgcacccctcccatccctgcctctgtgatcacatggtcttctctgtgtcgtccttctctgagtcgttcttagatggacattcatgatggcatttagggcccacttggacaatccaggaccatctcctcatctgcagatgtttgacttaatcaaatctgcaaatcctctctccaaataaggtctcatctacagattctggggattagcatgtggacatctgttgggggctatttttcattaactgttcagtgactactgctctgagacttgatgatctcatctgtagagtggggataaaagtcccattctcacaaagtcttgagtcaatcaccaacaggccgtgagcaggcactcggcaggcaacagtgaatgttcctcagtggttgagccctgcccctcccctctgaccgctgaggctgcttctccctccctttcccttggtggttgatctgccctggtcttggagacagtgagaggacctgggtggcaggcctgccgatggcctctgatccgcaggccctttttccccatttccacctccttctccttccactgcctgtccccacagtgaggcacgtgtgctgccgtggggcacaggccttgtgcttggcaagggttaagcatatgcaggttcccctccttccctgagagcctccccgggggcttctgcctcctcccactccctcttctgttctctcatatcaaagctcccaccaggctcggtggctcaggcctgtaatcccagcactttgggaggctgagggagtcggatcacttgaggtcaggagtttgagaccagcctggccaacctagtgaaaccccttttctactaaaaatacaaaaattagccaggcgtggtgacacgcacctgcaatcccagctacttgggaggctgaggcaggagaatcacttgaacatgggaggtgcaggttgcagtgaactgagatcatgccactgcactccagcctgggcaacagagcaagaccgtctcaaaaaaaaaaaaaaaaaaaaaaaaaaaacgaagcccaaaaacaaaagacatctctgggtccctctctattttccagacagatctctggcaagtcagggactttgcccaaggttgcctagcacattggcagtggattcagggcctttgccatgtccctgcctcatctgaaggagtgccaggcagcccttgctccaagccaagtctccaggagcctcctgggaggtagtacctcccccatttaggtttatagggtgctaaatgcactatggtgcaccagataggaaaaatcaatcacaatttcacttcattgccggatggaagaggaggtttacagaccagataacctgctcttggaaatgggtgtgtccatatatagggtgcccagatccattaggggctgcgtttagctggagggctgggtctggggaaggggctttctgttggatgagcaagggcttcaggtggatgcagctcccccatccctgatcccttgggagagtcggggactcggctctgaaaggctgtgggctggtgggagcccctgtgctgctcccaacttaggatgggatgaggaggggtgtggtggggtggacctgtcacatccattgaacaaaatgtctgtgcagctcctggcctgctgtgcaggctgacatttaggtatctcatcttaaacaaggagcagggggcgactggtgagcaacaaggccccactctatgtgtggacacctgcagcctcattcctgggagggcagaggacatatgactggcataaagtattgtgtgtagaaccagggtgggacagtctccgatgagttccctggtagcaaaggggacaaagtcctctcgctccactatttaagttcctttttgtggattggtggctctcttgcccaggatgtccactgaagacacgatggttgacaggtctctggctgctatgatgccaccccaggcccactctgtagagatgtgtttgggaaggagcatgtctggctttagcatctcccaccaggaccattctgtcaacttctaccctggtccctctgctgcctccttcttcccaccttgctgctctccccacagccttcccttacttgcttccacctccatacctttcctctcgctgttcccttcacctgcaatgtacactcccttccttaactcagctcaaggtctcagctaaacctgtgtggagccctggaacccaaagcaggagacgacaggggcaggaggagccctgggcagtggtgggaggggcaggagcctctgtggcacttcatgttctgggacagtcaggcagtgactgttgagggtacaggagcctgagttcagccctggggtcagagaggccaggattcaggaccctgccacttagtccttccagtcacctgcggaatagggtggtccccaaagtgcaaaaacagcagagttgcagagcccaggttggagagagaggagaagagccaccccaggcaggcgttggggctgggaagcagggagcccagcaggtctcctgggagggcctgggccagcctgtgggctctgggacaggcttttcagggctgtggttttacatgtgtgagctgcagcagcagaagcccattctccacacaacggtggactcagaacgcccatgtgcaaggctggctatggacgtggagtggggtcctcagaagccccgagcttcctctgaagagcctcttagatccaggctttggggcacacacttggagaatctctgctttagcaggaggtgagacacaggctgcccccagaggcctgggactgagatgacagctcctgggggtcattcctgggatctgagccttccttctcctttgctctcccttggcgtttggagatgcctttgtgcacactccagcttgccttatctgacctttgcagggttctaaggaaggaatgaaccttgttggactccagggggtcaaggggaatcctggatgttagcatgagagccccagatgagcctgagcttctgttcagtcctgccacccatcctgcctggagagcctgggtccaggaaagagacctctggaggtccttgcttttgcaaaggaagcagtttttcacacaggtaactttttggactagttgattctaagcagactgaagacccagtcctgagtcccagtttcctgactgtataatgggggtaaagaggtccttgccctggaaagatgaggcattcctatctagggtggacacacggtgtgtaatttcctttctcctcattggcccatggggcacggctccggcccgcagaagccctccctcacctgggctgcccaccatgggtgtctgcaccatgccacgggaagggtgcaaaggggcataacagtgggtcttgccctggtggctgaggcaagctggtgctggaattttccttctccctaacctcgggaaaaccaaggaatgaatcaatagaagtctcgaattaatagaatgagcaatgcaaaagattgctggcctgggaaatttaaagtaacaacccacgaggctaccaagagtaaaagtaaactaaaaaatacagtaatataaaagaacatcacataaaataaatacaagctgagaaacagtaaaaataagatgaaagaggttggcaagaaagggtagtaaggaagacaaagtagagacagagaattcacattcaactgaagagccaacacagcgctgggagaacagacgaaataagcaataaacaagggtgttttaaaaaaaaaccaaaaaacaaatctggcgtggtggctcacacctgtaatctcagcactttgggaggcgaggcaggaggattgcttgagtccaggagttcaagacagcctgggaaacatggtgaaaccccatctctacaaaaaatgaagaaaattatctgggcatggtaacatgtgcctgtggtctcagctactcaggaggctgaggtgggaggattgcttgagcccaggaggtctaggctacagtgagccatgatcacatcagtgtcctccggcttgggtgacagaacaagaccctgtctccaagaaaaaattgaaaacaggaaaaacccaatgggttaagagaggaaggcagcagtgagattttctgagcttggatcttggcagaaagtgggttccctggagcctgtagtgacggatgaggctggcagcaagaccccttcccagatgcctacagactcttccctgggggcttgaccttaagacctgggttggcctccaccctgtgtacacgggacagctgggttccatgccaaagcctgcagagaattccccaggcttggacttgatctttctttgcaggcagggcctgggccgaattgtcttccatatcactggtgggctctgtgctgaggagggaatgaggaagatagagtttttgggccctccctggagacgcatggttcaggaggggcacttctgcaggggttgggcactggtggttccacatcaggcaggcagctcctcaggattgtgcccaggaggcaggtcacttggagggccaggactccagctggcttttccttagtccagcttttggatggggtgagaaagaaggcaatggagaaaggaaaggtctgcatttctggaatgacaaagctttaagtcacaatgattgtagcttccaagtagaccactgaggcctctctctgccttgacatttcatctacagcttctgtggccaactactagcgtccagtgttgtttcagttgagattcctgatgagcccagttttatctttttgcaccctccttcaatttccttgtgtgtaaaatgggatgaccatctcctcggtaagatgtcaggtggtgagcacagtgcctgcatgtggtaagtgctaaagaaaagtaattagaatcagtaaaactgaagaactctttagaaaaagcagtcacctgtgctggctgagcttgtgtaaaagaaagatttactgactcagttttaatttctgtgaatacacctttgtgtagtgaggagcaaaccaagaggactgagccttgggcctgccagcaactcacctgatgcctttctctgggcctcagtttttctctctctgaagtggatgtgtgtcatatgacccagagatttctaatctatcttctccagctagattcttgcattaggggtgaacttgttcattgggtagagttgcttcccctggtttggagaggcagcatttgcagccccagaggctatcagggataagggtgttgggccaagaatagctgggccaggagcaataaactgttaagggcttgatgagtctgagcaactgaccaataacatccaatgcccctggaacctggcaactccaactttaggtggcagaggattaaacacattttgcctcaaggtgagtctgtacaggtccccagtggtctctgggcctgccttccagctctgtgaggaacaggagctgagcaagtgcctacagtcaccacgctgcctacagtgtccaggggattctagcctggataggaaaactggcttggctgagtggactgtcccagggtgaggatctgggaatgagcatatggggatggcagactaccacacgccctggaagctggagaggaaggaggcacccaggacagaaggtgaggttgccccaggtcaacaacttccagatgagatccaccttgagtcatgatcctcagatgccaagccacaggaacctcatcacccacctcatcatccaaactggaacttgatggaaatcattccacaactatgtgttggtgggttgtcttcttaatacttggaaggaggtcttaatacttatcccactgaaatcatgctacctacacctagcaaaacatacatcaaagaaaaacttctaactgggtatatcacatgcccactgtactaacacactggagaacccccaacaacaggaggcccggggagagtccctgacccacagggacttcaggtcaagaccacacccaccatcctttcaaggtggagacagtccccgtaggaaccaaactgatgtataataaaactcatcatttatttctcttctccctacagcatttcagccagtgaatggtagaattttgcaggaataagaattagaggtgtagagggttttgagatgcggggtgggtcaggtttcactactcaaggaccctaagacaggtttttggaagaagtgtgtgtgtgtgtgtgtgtgtgtgtgtgtgtgtgtgtaggaccacattcagccactcccatgggcaagtatgacatatgaccactcctctcttcttgccccctggcctccttaacctagaagtcaccttgctggctcatgggattccttgatacttctgcaatccagcttctccgctccaacaggctgtccctgcccagctgagctggcccagccagggttccctcacagtgctatgggcctccactggccccctctgcacagcccatcctctccaatctttctttccaaagtgaaatctaccaatgcttactctttggctctggccacatgagagacagacagacatacagacacacacttctttctttttgccttggctcaccactattcaatgcctggaagccttattttctcccttgggaacctccactcagtctttacaactgtcatctcctccaggaagtcatccctgctcttcttcccaggctggttcagagcccaggcatctgagcatacacagctcattcatagccccccccaacatttaaaagatgacttggttgggtgtctgcctcgcccactgcgctgggagctctgggcaagggctgtggtgggagcctctccccctggtgcgtggcgggagtcctggggcccctccgcggacaacagggcccggggacgttcccaggcttgctggaggagcagcttttgaacgaggctctgccaggtcccagaccccaggaagctcagctgtctcctcgaaatcttgggggtgccacatggagcccagtccctttcaggcacgagcccacaacagcttaacgctctctttggtggtggccggcccgaggcaggcaccggaggcggagggagccctgttccgctgtggccgcgaggagcgggctcttcgcccgggctcgcacatgaaagctccgtgcagggtcggagtctgagcccgccggccgcttggaaggctcctcacgtccaggcgccgcggtcacggctgcgctggtttccggccatgaattgggcttcagagtccgagcctcttgcccgactcccggctgagcgcgctgcccatggagcgggggatgggcgcccgccgaggtccgcgcggccagccagggttcgagcccacggcccgggctctactctgagatgcttgcggcggccggccccctctggctccccagctgtcctggggcctggcccggcgccccgccccggtctctcttcttgctccccaggtcccactccacgaggaacggtctgtttcggccggggacatgacccgagacgcgcggctgctgaggtcgccagggcgcttcgggagcccctcgagggcagttagcggccggccctcctccattctcccgcccctggcgaaccggagaaggaggcccgaaccgtcagagctcggcgcgccgcagcccaggccggtccccgccgctgtgccggtctccgagcgtcccccgagccgggagcgtggagcacccggcgccccctccgagccgcgagcgggcgagagccgcgcggcgaggctgaggctccgcagtcccgcgacaccagcacgcgcctacccccatacccgccccccatccccagccccacaccgcctgccgccctccacgtccccagccccacttcccacccaaacaaccccccatatacatccatccattcatatccttcacctcatttactcaccaccacctacccctcaccacacctcctcacccttcctttctctcacctctccactctcacccacactacctcgacatctacactctcccttctctcaaccatcactacttcacttctaccacactacaacttcctcactcgaccacaccctccgtatcccttcctacattctccctctccccaccacaataattcacctaatcatcttatcaaaccccccagctactcctaatcccaatgactacatcaatcaaccaacaacacaaacacaaaaaactcaacacacaatccacaatacacctaccaccactacacccacactactccaaaaactaatcaacactccacaaaagtaccacacacgcctcaacacccacacaccacatacccnnnnnnnnnnnnnnnnnnnntgggggcgggggggaggggtggggctcggggggaatggtggggagttagagaagcgcggggggcagggtggagaggtcagtgcgggggggggcgtgcgactcagaagctgtgggtggagctacgggtggcggaggggttgagtgggggggtgtgggggggtgggaggggtggtgtacgtagcgtgtgcagtggtggtgtgcgtggtcatagtgagtagagtcgccgacgcaggcggcacgaccgtaggcatgtgggacggccggtgcgccttgttgtaggccccggcagtagcgacgtccctgtgcctcgtaattgcgtgcgctcctgcagctggtgtagagaagaaaaactgaagggtagggtgaggggagggggcgtcctccgcagttcgctcctcgccggggctcagacacacagccagcccagagccgccacgccggcccggccgccgccgccaccgcctcagcctcccccgaagccgctctagccgcgggaagcgccgctgccacagccgcgggccgcccccgccgcgccggcctgggctcaagctgccagcaccgccgcagccgccaccggagccggagcgggagcccgaccgcgctgggctgggctgggctgggctggggcgggcgcagggcgcaggggcgggcgcgcgggggaagacgcacgggcgggctcggctctcccggggagcggcccgggactgcaccgggaccagcgcctccccgcttcgcgctgccctcggcctcgccccgggcccgggtggatgagccgcgcgcccgggggacatggaagcgctgacgctgtggcttctcccctggatatgccagtgcgtgtcggtgcgggccgactccatcatccacatcggtaagcgcggctggaggccgggccgaggctgggcgggggccccaacggggcagggggtgcgcggcgtccaaacttggcgtttccctgggccgaggggctcggcgggcggtgctcccccgaagggccgcgccgcgccgcccggcggaggagctgtgcaccggccgcgccgcgctcccgctggctgcttgccgctccccggggctccgatctccgcgcggggccccgcggcctctaccgacacttagggccgacgcttcggggaacaccgggatggacgcgcgtcgagacccgcgcccttagcggggccgtcggcgggtcgggagggcccttctgcgcagctcagagcagcggggggcagggggaggtacagcggggggctcgccaagttggcagggcaagatcaaagaggccggaccggaaccgtgtgtgaatgtgtgtgggtgcgtgttgtcagcgtgtgtcgctgtgtgcgcctggcacggtgtcggtgttactgtgagagggtgttggggtgtgtggggccatctgagcgtgtgttggtgcgtgcacgactgtctgtcagcctgttagagtggacacagtgtctgcctgcttctccggtgtgtgtctgtgtagcccttggtgtatgtgtgagtgcgtgtgtatctggttgtggcgactgcatccccatcctggacagtcctagagttttgcgtggtccaagtcttgggggcccagacggtctgggtggtgggagccgagggaagaagcgtgggcagcggggggtagggggatgctgagcgggaagagatggatagagagagagaaccgggagagaagatgaaagcgcagaggaggagggggcgcgccgagggggagtgggcgcgccgagggggagtgggtgggagttgggagcaacacgggaggaatctcgggaagttgggccgagttggggggctgacagcggtcgctttgggggagtccctccgcagtcgtctttccggaagttgggaaagaccagcgagcacagggaaactgggggttgggaggtgttgaaggcgaggaggacgggacaaggcgggagggtgggtggtggagtggggtggtgaggactaggcctgggctcggagagctacgattcctcctcaggggcccgtgaccaaacctgcttcccgccctggaggggtgcgggtctcgcggtcagcattgcggcgccggctccgggtgtagtgaggaatccgggcctccctcctcctacccagcccccagctcgagggatcactgggcctagctccgggacctcagggaccctcgaggcttggtgaggcgggatgtgggtggctgactccagagctgtccaggttgcaggactaggctcgggctggtcgcactgatctcggctggaagcgcagggtccgtggaagctgtgctaggcgcacaaagcgccagccggagggcgccctggaggagctgtccgcggttctagaaagcccttcaagagcagctccttctgggacccccagctccgctagatctgaacgtggaggcgcctaggacacaagtccccttcccccactcccctcgacagacgtacaggaaatgggagtggggaaggatggagagtaggaggctgagctcagggcgccaggccgggcagcgtcacagtcatccaagctgcaggccatccgaagcccctgcctaaggaagacccctctgcgcaggaaagccaactgtagacctgcttcgctcagctccactcagcaggggacgtgcatggagaaggacccatcattctgtcctgggatttgggtgggggacaccaccctcccggggaacttcctggctcctgggatgggatttatggaaccatgtcaaggcatttgggcgctgcctggggccaccccagcttggcttagtcccttgtgtggagcatggctaggacatgtggtgccttggttgtgagacacgtgtgtgacctggtggcagcctgtgggatgtgcatgtgtaactcatgtcaactgtgtgcacgtgtgcgctgagggctggtggggggaggggaacatattcctgtgcaggtggagatcggagagccttaatctaccccgccaagctgaaatcccagttcagacttcccaccacccggcaatcatcggtctgcgagtgccttgaccctcgggccaagggaagcggggagagggttcttgtccaggtccggtcttgatcccttctctcctccaggtgccatcttcgaggagaacgcggccaaggacgacagggtgttccagttggcggtatccgacctgagcctcaacgatgacatcctgcagagcgagaagatcacctactccatcaaggtcatcgaggccaacaacccattccaggctgtgcaggaaggtgagtgaccgctgtgcccagggcccactgggacacggcctgcgaggcgtcgcagcagtgggcaccggaggggttgggacgagctgggctgcgcagggcaccctctgttcctcggcagccgcggtgccatgcgcggtggcgcgccttccccggcccacctaggcagcggcgccgggactgctctgcgctgcgggccggcacggagagcctgcgagcgcggggagctggtgttcttgcgggttgcgtggcgcccttcgggctgtgtgggcgcgggtgtgcgcccagcgctggccgcgcaggcgtgcgtggctcggggcagtctttgtttctcggtgtttgggggtgggcgtgtctgcgtgccgggtacctgtatcgggcgcacctcccctgatctcagtggcccggtgttttcctcgcttcgaggtgaggagcgcccagcggctggagcccgacctgtctccttctcccgggcataacctggtaggcgcggcgtttcgcgccccgcggcccccagagcctcagcccggcgcttctctgcagcgctcctccaccaggtttggaggagccggtttctctctcgctgtccgcgccgcgggcggaggcgccgccgcctgggccggaggtgggcgctgttcgcccaggaaaggagcggagctgggccggtccggctgcggggaaatcctggcctacgccggggccgcccttgtccacagccactgcctccggtcgggccccgcggcaggcgccacaggtgcgaggcgagggcgttcacgacagcaaccccctctgctttccctcctctctgctagtccctccccttcaacctttcagctcgggaaccctggttccttctccaagcctccagattcctggttaaggcctaaggctccgcctctgacacttacccggcttaagtcccttctccttccctctgccttgctccccgcaaccatggggactctggggccagcgcccctcagtgctgaggcaagttagtggcgcaggatgcagggattccttgctggaggaactggtagagaagtgtagagggggcagtgggtgtagtgggaggtgggctggctaagagctcctggctggtgttttctcctcaagcccgttgagccgagagtcctcctgctgctttggtacacatgggttgctagtctccccggtgcctgcaaggacaggatgcctcgatgatggctctggcctgggtctggggggtcagagctggtgttggggaggtcgttgtgttggaaggaggaattctgggggtctcctattcttgggtgcagcagaggaaggaaaggggccagctctgggggcagggaccggggactacttctggggactgaaggtccaaggatttcttgaggtggttttacaaaccgggagtcccaagtgttttcttttagggggggtgaggctaacactgcctattatgggagctgctgcttccagctgtgacagatgtccattgtcagatgtctgttgaggtacagggaagaggaattcctgcccttctttggtgtctggtcgtgtcccaccagcagtctctatctccagacaccccctgcctctggacttcttttcagtgtgcccttatcacagctccttgcaggtgcttggggtgggctccagccaggggagggcagggccttcttagcggaaggaaccctaaatggggtggggacctggggtgacaagctacaactttcacagtgccacctgttcccttgacactggttccacaaaccccatctctgttgacattcattctttgtgcttgggagctgaagccacagtttggaagcacatatttcctggacccaggagctcacagtgtggtggggaccctgcctgtgttccatgtctggtgacacacctctgttggctcccctctgcagtgttgagtatccaagctcattcattttgcctctgaatgatgcccgtccgctcccatcagcagttccccagggactaaacatgatgctcttgcacaaggttgccacctcatgcaggtaacacacaaggatgaaccgggcagctggttcctgtggcacctggagtacagggtctgaagaggtcatctccattaaaaggagaagctgtcacacagctttaacagattttgccattgggcgtgaaaatcctactgttgtagatgtgctgatttatttttttaagaggagccccaaatctggaccttaatgtaaattttgatttaaagctattgccaactaataaaataatgtaaacaacacagtacaagccaaacaaaacatagctatgggtgattcaacctgtaagcgccccaaagcaactttgtcctggggacaaaggttccacccaggggccttttctgggtcttggtttctctgtttgtatagctggaaaaatgtgtcaggctccaaggatggcagactgacacagtctctgtggggtgtgagagtgagtgtttctgcatgtctggaactagggagttagattcttggttgacagttgtctagggagagagacactggccaggtattgttggtgggctgcctgctgcccagagagtttgtgctggtgaaagctggcatgtactttcattttatgagtctggtggactgaaatccattgttatcttgtgaccttgcatagcccttggatgcctacaagggatgggaggagcctgccctggaaggcctctgtgaggggcagagcagtgctcagcagcctccttttcccttgcctggggctctgctgcaggtgctcagctctctggatgtccttccttggatgtactctgtggggtgcttttccatcactgggcttgatccctgcttgatgaatgccttatatctcactgctgggcctggacatccattgcagcaggacatgggttgtcgatacaggttgagtaggaaagaaaaagacttttagtagcggagtggtcagggatggagagcaaaggcagatgggggcttgatctccatcattgactggacaagcccacagtgacctctcagtggagtggtgctgtcgctgttttggtctgagaggcagtgccatgcagtgataagagcttggtggagcttaaagagtttcagttcccatcttgcttgtcttcactcgtggtgtgaccctggagctctgctctgagcttctgtttccagatctgttcaaagggaataatcataggatttgcctcatgggattgtgaggattaaatgagatgagacatgtgtaaatcatctacataaggcctgcggtgggtgttctgtaaacagtaattccctttccgttccttgacccaactgtgaatccatctcagcttctcttgaggccgttgatattttcagctacattatttttttaagctagtgaattccttgagagaggacctaaactgaccttttcatttttagctcttacttttttccctgattataaaagaaatgcattgctgcaatgagcatgtattaatataaaaatataaaaaagaaaaagggcaatgtgtgcttattatataaaatgtggaaggtacaggaaagtgtcaagaggcagaacaaaatcactctgaattgcactagtgttatttccttccagtcttccccccaccactgtattttatacattttgagagctcccattctgttcagttttatatcctgttattttttcctatttaacatcattggccttttctgaaatcactatgaactatttgtaaacattacttctagtaactgcatacatttctcaatattcaaaacttttttttttataaaagggaactatttatgctgagatatgcagaatcaaatattcctgaacaaaacaagaaactcggcctggatatgttggtcctaagatttatacttacaatttcttcaggatgacttttaacaagctccttacaagcactgccttttaggacatttggtcaatgtatggaaaacaatggatcacacaataaaatatccatttgataaggattgaaagttagcaaataacacagaaaggacatttaaatctctaaaatgttgcatcttagatttagctggcaaagtccatattaacaaatagtgtgaaaatttgtcttctaggtactaaaagagatcctaatttgttaaataaaaaaatttcagattgttgtaaagtgcttgctcaagtaggagtttatataaatgcatataatttatataaaagaactggctgagcacgagtcttctcatttcccagcattactttttactgtgagtaaaagacgagagttattagatatgctgtagatatacctgtcgcagtgtggaaggataacagtttaggaaagaggcagaaaaaaggaatgcatgcaagtgaggcaatattccttttagttatcataagcacaaaaggattctaggaagacataaaaattaccaagaatagcttgtggttcacagaatgaaacaatgaaataaaataaaaatgaaacacagagagcttgttggtgcccatctggaggccttgctcagtttatatccgttacctcctaggtggtcaccctgcccctcactggccacactggtatctagacattctgctagaggctccccatccctagctctgatggcttccggcatcttcgttggctccattcagaattatagagaattgtaggtcccatcgaggccacgctcttgcagtcctcccggcagcctcaccagacaccatcagaggctctctgagtgtgatgtccgtgtcttcctaaagatgcctgtagaccccttattcccatcctctcagctgtgttagttttcttgtggtgcggaaacaaattttaccccaaatttagttggttagatcaacacacatttattctcttgcagttctgcaggtcagaagcctaacatgggtctcactgggctaaaatctgggtccttctggaggctggaggaaagatttgtttcctggccttctccagcttccaaagactgctggattcctcagcccctggccctttcctccattttcaaggccagcaatggcgggtcaaggccttctcacatcctctcatgctgacctggcttctgtcatcacatctccttctctgactcttctgcttggctccctctttcaaggacctttgtggttatattgggcccatctggataatcccagataatctccctattatttatttattcttttttgagacagagtctctctctgtcacccaggttggagtgcagtggtatgatcttggctcactgcaagctctgcctcccggattcacactattctcccgcctcagcctcccgagtagctgggactacaggcgcccgccaccatgcccggctaattttttgtatttttagtagagacgggatttcactgtgttagccaggatggtctcaatctcctgacctcgtgatccgcctgcctttgcctcccaaagtgctgggattacagatgtgagccaccgtgcccggccctccctattttaaggatagctggtttgcaagcttaatgctgtctgctacctgtgccatgtagcctaacatattcacagatctggggattaggatgtagacatctttgagggccattattctcctaccatgttggcacacctgtctgtgcccaatatgcattgtccacctccactttccttccaccctgataatcttttgcatgcttgactgcactcttgcttactgcggggcatcctcttttgttcgctgggcctgctatagtcacttgggatggatggctatgtttcctttctgtttctacaaagctcaccctggaagcatcacactgtaagcctgtggagcctccacagacttgcctgtgttctccaatgacatgtcagcttcttttcctgggcttggctgctgcttgtgcataaggaagttcctggaggaaactgctgttcgaatagtcagactgtaagttggtgctgccgcttggacccagggcctcttttctgcctgagcaggttgttcttcagaacctcaccgtctaggcccatgcctacctacaccccaagggacggccctcgttgaagtcaatcttgctttgccgcccggggtcccacagagagctgctgttcctggtcccctcaagggctactgccagtgataacagctgtggatgaggctgcaggcattgatagtctggagttaggccctgggtcccctctctggattccccacaagcccgtgctgaactcacggtgtcagggtgctgaactcacaggtgtcagggttctccttcattctggagtcactcctgtgcaggtgcacacacaggcatgtgcaacacacacacacatgcatgcatatactcaggcacacacacatccacctgtactcaagagcacacacacgtgcacatatgcatgagggcacacacactttctcattttatagactacactccagcaccacccacttcctcaaattttgggttcaagaggctcccttcattccttattgccatggcttagccctctagattgggaggttggacttaactggcagtgagcagatggataccttatgccaggcgtgtgggagaggccacgggtcatactgcctctgagctgctgctgttcctagtcctgggctggcctgtgacagccccttcctctgggatactgtcctttctgacaggcattgggcccaggaaggcagctgggtctgtgtccaacatctcagctaggctctctgagccctccctcccagcctggaaacagccagtttcctggccaatggccatggttgagaaagaagaacccagagttccccttctggacctgaggtgtgggcagggtggactggaggggatgaggtggccccttttgtttctaggtctaggacatgagtactttgacaattttcctcctggagccatttctccaggtttctcttgggggccagctaaggctgtccctcagcactcacagtcacctcttgtaatggcagacagactctctttcccaattcttgtagctgcgaggttgaaatcctctagctttgtcctcatagcagctgtcttccctcttcactgagccttctactgcccaggaaatgctgtcgcctaacaactcagagcatcccttctgccctgcctcttcccagataatttctaacccattccatccctggatgtgattctttttacacttggttacccatggctgtgcctgtgggtctccaccctttggttttgttctgtgtttcccgttgtatgagtcaggggagactaagttatgctgcagtaacaaacaatccaaaactcccagcagctttcatgacacagtatttcctcctcctgctgtgtgtccattgccggtcagtggggagcttggtccctcatggtcacttcacttggttgttgccagttgctgtgccagagggaaagagagctctggggggctcagcctggatgtgctcacatcacttctgcttatgactcgttggccacaaccagccatgtggccacagccagtcacaagggatccaggaagcacagccctactatgtgcctggaagcagagagaactggaaacaactggtgagcaacagaattgcctctttaccattcatggctaaacagccctcctatttccttggcgtttcattaaaataacagcaacaaacaaaaagcaaaaaacagttttgggtacgggatgctagttgggcagaatctgtggctcccattgataccccactgtgtactcagcgacttgtccctcctctgcagacctctgggcagcccttccatgtgctgggaagttaggaagcctgggtccccagcctaggctggggttgcacctctgcttttctccatgtctgccaatcttgtgctctgtaaactagtgcctggacaagcccagctctcaggaccattgagctagtcatgaggtaaagattgggttctctgcccagccaccgacaggaccagcacccatgacctccccctgtccccgtagctggactttggcaagtctgcactttccacggcttcagccctgtggccctgtccctcatatagactcccacgtcttgcccctgctgccccacgaagtggcagccctctcctgctaatggcagtgggctggggcagagaccacgcatctctctgccattgctggcctgtgacagcccctttctctggggtgctgccctctctgacaggcactgggcccaggaagacagctgggtctgtgtccaacaactcagctagactctctgagcccttcctcccagcctgtaaacagccagtttcctggcagatggccacggttgaagaaaggagaacccagagttcccctttctgggcctgaggtgtgggcagagtggtctggagggtatgagatgccccttccgtttctaggtccaagctgtaggcagtgtaggttaccagtgggtgaggtggggggtgttagctgggggactagggtggtcctgagcccaggctgccccttctcctccacccaggtgtgggacatgtggccctgatggccccatctttccagttttccctcacactcatccctcaacagaccctagatgaggcagctgggctctgagactgcatctccacctggcccaccctggtcccccactgtgctcagcctggcccttccccatgcctccactggagcatccgtggggtgtccaggagctgaagaggcgggagtgtggtggctgtctcacacagactggggctcccacccctgctctgctttctgactctgggtgggcaacctcggtttccctgactgtaaaatggaatagaggacagctgagaggatcagttgaggaaatgcactagaatagcccagcccagggtgagcacagggcagtggctgggtgaagaggtggaggtggctgtgatcttactagcctgagtggtctgtggtggagacttgtcctcctctcacttcctgttctgggctgggcagtgtgagcaggttcccacagccttggccccacttagggcgggggagatgtgcagcttggagttgagccccagccattctgggtgtctcaagagagcagggaaggaggttagtgttgacgacatggctcatatggaggctgctcggagccatctgtataggctggggctctgggaacctgtggcctgtcacggcacggtatttccatcttactgtggtcttgtctgctctgagtgcatagagtggccagaatcccactggcctgcccctccctccccgggacctggccatagggcaggcctaccttgctctatttggtggaaaggggtcaggtggaaaggtgtgggttcagttcccaaatctgattgattatctgtgtggtcttgaacagatcgcattccctctctgaccctcagtctcaacatctgtgaaatgggcctgccttggggttgtggtggtggatctagagaggacgtatggccagcaggagggaggctgtggtgagcaacagtccaccatggcgcccgagagaggggtgcttagcgccttggggctcattctcccattgagggcgtgggtgccggcacatagtatgctcagcaggcattcgttcttgttgtgtcccggccaccatgttttccatcctcctgggaccctgccaaggtacacgacacctcttggtctctgggtcctgtctgggtgctagcaacccccaggtccgggctgagacaccggccttgctgcctggagctctgggcccagcccacccatggtctggctctgctgtggcctgtgcccctataaactgggtcctggcctggcctggaaggctgtcttcttgctgtctgtcccccatggcgctcttccttctcagtccaaggtggagacttgaggtcctgccatgggtccgctcctggcctggggccgtgggccttctgccttttcatctgagtgcccagaggtgtggtgagccatggagtggccccactctggcctctggtctgggctctgggctcaaagctctgagacctgacctgagctctgggccgagcccccctcccaacagtgccccatctccagtggccagtgtcagatgctgaggtggccttgatttggctgggctctagggctcctaactccttccctgccatggctgtaacatccaatgctggtcctcctgtgtcccaggaggctcccagggtacctgccctcactcacctctcccacagggctctcgtaactaaaacaaccccgtgggccgtccccaagtcctgcagtttgccagcctgggcctggagagctgagggtgggtctctccttatcacagaaccccaactggagctggcccaaggcttgctgctggggcccagctctgtgaagggacctgagcctcagctcagggcatatctactgtgcacctgataaaggctttggagggctgagccatcacactgctggaacgggaggaacatggccataggtgccctggacagtccagcagtgtgatggctcagccctccaaagggcttctgggggctctggtgtggtgggcagtgctgagcagatgtgtatgtacacacatgcatacatacacaaggagactgttgcagacacccatgctgcctgggcatgtttagcagaaagagccaagacttccagctgctgctcagagctccgctggccccctcagactcctcctggactcacgtgaggtcccagttgggaggtggcatcctcagggtgcatcccagcacccacaggagactggcctggtcatgtgctccccttgccttgtgtttcctttgacttgtcggtgatgtcttctggaggttgtgggctgtggggagggagggacttggtcgcttttgttccctgtggtatcctcagctctaagggcagtttgtagtgcacactcaataaacacattttcctttccctcctggggcacgttcctggcctcagatgtgtaggcctgacctcagggctctcagagatcatccaatgggatggtcattgcagtggtggtcacttaacttggccaaggtcaggaggaggctgtggacagcaccttaggtgttttttcattgtcagtgtcccctgtagcatctcagcatcatgctagtgggatgagagggagccagtctgcctgcccaccccagggagtggccctcttggggtctcagctatacaggtcagcagatgccagagttcttgtgtccagagctgagggggccatgcaaaaccaaggccagactgggggaaggtctagaagtgttatggactgaatgtttgttttccctaatatgatgtcaaagcccttaacccccaatgtgatggcattgcaggcagggccttgggaggtaattaggtttagatggggtcataagggtggggccctcatgatgggattagtggccttataagaagagacaccggagagcttgctgtgtctctctgctgtgtgaggatgcagcaagaaggcagccatctgcaagccaggaagacagccctcatcaggaaccaaccatgctggcaccctgatcttggactttcagcttccagaactgtctgttgagaaaataaattcgtctgttgtttaatccacctgtctatggtgttttgttttagcagccagagcagactaagacaggaggggaagggctgtgagcaaaccctggcctggggctagacctggccaggcactgactgcctgagggagcgtggaccagccctgccttcttagggctacagtgcccaaatttctcaaatccagccttggaccacatgagctgaagatccatgtacctctgaggatgggtgactctcatctcgaaccagtctttatgctgagctgtatttttagtagagacggggtttcaccatgttggtcaggctggtctctaactcctgaccttgtgatccgctcgcctcggcctcctaaagtgctgggattacaggcgtgagccatcacgcctggccccttttgtcactgcccctctttacacacagggtccctggtgtacctaaacaagggacgtaattcacagagcctcagtgttccttcctgtacacttgggatactggtgcccccacttaatgggctgacttcgggaacaaatgaagtaacgattacagaggacttagcatgtgcctggcaccaaggaggtgctcagtaaagaacagctacagttattgttctcatgatgtcacctggccagtgcagagggatggggatggtcactgcttgttctggatgctctgctgatgttgatgaagcccaagaggacactggcttcccaaatcactgcttgctgtggctgtgggtgagcctctgatcctcaggccctgggatcttctcccaagagaagggggtgcatcagacacccctgccaatgctcatgcagctggctatttgactccaaatgcggtctgtacactggctcctttagtcctgtgtgctcagagctctgcgaatctcatgcctactttctagagggctggctgtctttcccagccccagccaccttgtaggggggcctgtgctgccctcaccaacctcagaaatgtccagcaggctggacccattgatccctcagcccacctccccagcctgccctgtggcttgaccctgggtcacagaccagctcctacgtgtgctgcaagaatcccagaaatcccattagcccgtgtgtgtctgtacctgactcagtcctgcgcactttttctatccacatacaccgtcttgtgcatgtttcacggagccacaggatgccggagtcggctggggtcctggagccatttcagctgatcctcctttcattgtagaagcctcatggacagtcacctgagtggcgcttgcagctggcccaggaatctcactgggtaaaggaatgcagtgagcttggcagcatctgctgtactgcaggctcctggtgattgcctgttcaaaagcagaggcatctgcatgttctcactcatgtgggagctaaacacattgaactcatagaagtagagagtggaatacaggttactagagactggggagggcagggggagggaagatagggagaagatggttaagggacacaaagttacagctggttagaaggcataagttctagtggtccagagcactgcagggtgactataattaacaacaatttattgtatattttcaaacagctagaagagaggaatttggatgttctcaacacaaagaaatgatgaatgtttgaggtgatggatatgctaattacctgatgtgatcattacacattgtacgcatgtattgaaatatcactctgtaccccataaatatgtacaattactaaacatcaattttaaaaaaggcagaggtgtctaccaatacattacaaactgcccagagctgtctgggcatcatctcaggacaatcctgggcagtacagggaatgacacagaaagcaaagtgaagcagggattgcttagggaatgtgaaggactggcagccaagccggtgctctccttgtacgtgctgggcctcccactacgcacctggcttttgtgtggttctctccacctccagtgccatctccccagccccagcctggacacttgaggtcacttccccgtgtccccctgcctctgcccttccctccaggccattgtccatgtagcagccagagttatctgaaaaatcaacctaaccacctccctctcctgctgaaacccttcaatggctccccattgcactaagaatcaaatccagaccccttgccagggctgcaagtccccaaggaccccgacaaaagctgaacttacctgtgtcttagccgccacttctcttgacctcactgctctggccacattggccttttccccatctctccaacaagccaagcatgcatctaccctggggcctttgcacatgctgttcctactatctggaaggctctttgcatgctgggccccttcttggcctttggctatgcctctgatcttacctcctcagagaagctccccttggctccaagtagggcccctattactctaccaaaatgttcttttccttctttgtaggcgtcctcgtcggcaatgatgttattaatttatttgtgagggccatcaggtttgtgagggcagagaagtgtctgtcttgtttactgccaagtccccagagccaagcctggtatgtggctggttggaggtgttcagtaaaagtccttggatgggcaacaggatggagggactcatgggaactctgctctctgcaacctctgcatgctgctgctccttgtccggtgttctttctcaggaccacttggggtcgcacagctgcatgtatagcagccctgtcctgccccctgtaggtctgcctgtgctagcccttccctcctggtcagcttctgcactgaagatctttctggcaagaaaagatgagagctgatggcactgcctctccctggtaatggctatttatatgagggcttccaaggccatgtgcaaaggggagaaccacgctggagatgtttccaacactcactggctggagtgggaaagttctggaggccccatgcctctgtatgcctgaggtgtgcctgtgtgggcgggagagggtagttgggggtgagtggagaagtcgtgcagaagaaatagaagctcacccgggctccaggtgctggcggtataagcttgtgcaccagaacttgggtttctcttctcttctcccacctgggaattttctggtggcttaggagcccctcttcccccagcagcctccatgggtgaaatggggctgacatggtcctggccactgcctctttctggccagggcaggggaaagggtccctggccgggaaggggaggagctgttgcaggtctagggcagtgagcctgacagccgtgagcttggcagggaggtattgcccaccagctcccaccagtgcctccctccgcactccaggagctgctgaccattgcctgtctgtgaggacatagccagcagccactgctgccaccacgcgggcctctgaggaagcaggagctggacccttcctggtgagcaggggctagaagggctttgaagctctgtagttgtacatgctcaagctttcttaggagaagcctgcatgagtgcagccaggatgggatccactgctttaggctacttagctcctgccaagaaaattaacattgttaaaggcaggacagcgaggtctgtgatgagtctcagtacgcactgatcggcactggtgaatgcttccgggagctcctggatgtcaggtgcagccagcaggggcatgcatgtggctctgccttggccttgccctgggacgctgtcacgtggacgtgctacgtgcgtggatgtgctggggctcttgcatgccagtccaggcactggcacatagcagatgggcccccactcagccttgcccctcagagctccccagggcatcttcccgacaccaggcccctgtggctgctggcctgcagggtcacacctgtgctcagcattcaagtcctcgtggtctggcctctggcctggcatccagtctgctctctcctggttgcctccacccatccaccctgtgccgcagagccccgtctcatcccagtctcagttctgtacgctcttcaggaggcctttcctggccgctctgcttcctctgcccgggccggggccgcctcattgctgtcatgccattcattgtgtctttggtgtctggcttctacatgcacctttgaagtctgtgagcaccagcaccatgaactcctcatcttgggactcccaggcctgtacaggcctaggcacatgcaggggtggagcaaatgtttgttgagtggctgcctgactggacctctgacaagtacacacgaggacctgcacacacatactgcatgcacacttgtgtgtcccagagagctcacagtgcacaccggctgttggactgagaccccagtgataggtggtccaggggtcatcttcccagagagtcccttcctgggggagcctgtctagatatgctgggaggtccccactgggaccatggggaaggtggccgggcctcgcaccctgtggcacataggggtttctgcctctcatggcctgtggggaagttgtggcccacgtgtgtgtttgtcagaatgctaaagcggaccatctgagactatcacctccagggaaacctgctgtgggtctgaaatcaccctccatgtgagtcataataatcatgctggtgtcagaaactctcatttgggcctaagcaaaacagggatcattattaggccatgtaatagaaaaggccagaggctgcatcgcttcaggcatggctggatccaaggcccaaatggtatccacaggactctgcctccgtctccacaccccttgtccctgctctctcctgtgtggtttccttcctgggcagcctcctgcctgttgcaggctgatgtctaatgagcccagccccctggccacttgcccctggaagagggggattatttaacaagagtctcacaggagtcccaggacttcagctcactgggctggtatggggctgaatcacttcctccccgaatcaatcctggtgcccaaggagtagaacaccctgattgtcagactggtgggggctgcccagtccctggactgagagtgaaagaggcacggtagatgggggtggggtcacttggagaggaagagaaaggatgccgagactgcagcagtgtccagctgggggcttctctgccacaggcacttggaatgtggcctgtcacgttaaggggggattggactgggagcctcagggcaacacctggtgacagttgttccggagagctccaggagacccaaacagtgctggctggaaagctctttggggacaggagagtaaggaggggaagggccaggctttgagctctgtggtatgtccatgggtgggtggggcagggcaggagggtggggctgggcagttagggtaggctttctggggtaagggacatgtgccagcccgcaggatgacacctgtgctcagcgttcacgcagggtaccgggcctgggcctctcacacatagccctcactatgtagctgccatgtatgctcttgtacctggtttcagtcttccccagccgggaggcctctccttaccccatgcatacattgtgggtggggatctctgctttattcctcccaataggcacatttgtggggaaccctgagagctccctccaggttccaagggacaaggaggagtcctgggccagcagccttgccccatcctcctggccagcctctgtttatccttctgcctagtggggccaatgcctggggctgccgtggacttcgggaagctgggctgctgctgggaggtggctgccttatcagcaaaggcctggctcctgcctcctgggcagcgtctgctccgctctgaacgattaattgaatagaaatcctagcactgtgaggcaaagctagggccctgcctaatctcattaagaagtcccctgacagtctcattaggcggctggctactcagagacgtttatctctgctacaggatggtcagggcctggagggggtggacctggggccaggccccacccagctgccctccaaacacaggcctgggcagagataaggctatggcagctctgccagccagcaccagtccctacttaatcggttatggtttgctggacttaattactttaaaattattaatttcagctggagaaagcaggtggtggtggtccaagaagaaacgtgagccttcttaaggggtgtaaggtgggctggggcggagacggtgtttccagctggcagaacccatgtgctggagttgccctggcaggccacacccagcagcgtgtctggacactctgcatactatggccactagctgggtgtggcagggacagacgagtggcctaagaatgtgaagcatgctacaagagaatgaagcctgcccaggggtgtgggagcacaggggtggtgcctaacctagcctgggcttggggttaaccaggggaggcttcctggaagaagtgacttctgagctgagtcttaagtgtggaacagtggttggtcaggtgaagaaagggaggcaggcactccaggcagtggcatagctggagctagggctcagaggtgagctgtccagggtccctgggcatagatggaggaggtgctgacatcctggcaaagtctgcaggggccttagggcttccctctggtacaggcagaagtggctcaggactgaacccctgagcatcaaaggatctaggatgtgggccactggaggggacatcgctggggctcagagccatgtgcctccatctaggcccttaagctgtgaggagagaggcctgtggggatggcagaattgcacaggctagtcagctcccccaacccctgcctctgcaggcatctgtgctctggattcagggccgctccctgaggatcccaggtgcagcgcgtaccattcttggaggtttcaggacttctacatggctgaggcccatccctaagcctggcttctgcctcccatggccacagatgcctggtctgccacagagaggggaaaggaggaccaggctgctaggctagctggcttctccctggatgggaagcagggcttagacccccaaatttgcccaaggcctggtggtaggtctgatagccccaggcctctctcttttccaccccagggtcccctgttcctgtccacccaagctgcaccactctgagtgactttattacatatactgttgagatggtgctggcttatgacaagggtacctgcatttcataacatatggcagctcgaggcccctccatgcagacatgaagatgaagatgtctcatgtcagacatctgagatgaaggctcatgcaccagcagtggactttggaacatgtgccaagggaagaggaagtgtgaatcagggcaggagggaaggccagtctgattggtcactgccgtgggccactggagctcattcctgctggggccctccagggaaccacaaaaaaatgcatctggattgtccatccgggcagggaaagtgggagcatttatccaccagcccactcctcactggtcagagggacccggtgctgctcccttcccaggtattccaggtttgtgcagcagcttggctgggcagttcccgcctggtgccagcagagagccccctgctgagcagagatgagggctgcccagggatgcccgtatgcagccagtcaccacagcaacaggaggagaggtggctgagaggatgtgacatgggccacaagagttgtctagagacccaaattctgctagacttcttagaatgacctaatggtaaaattcaggtgtcaagacagggctttcctggtgtgtgtaaattatatcctacaagtgtactttggctccaaaagaggctggtataggaggggctgtgctccatttctccccagcacctggtggcattgctagaccaccacggcctcagaggcagcacctggctcttgctggtccctgctcctcccctagcttctggtccagtgtggggcacatgtgggccagtcttggctggggggaaggcaggtgggatagggcgaagtctctgaatcatctttgacactggacagtgctgtggctgggctgagtccctcttctgcctcttattggctgtgcgagtcagtgcatgttcctctacatatctgagcctcagtttcctcatctgtaggatggggatactcacatctaccttgaagaattgttttgagagtctgaagacatggtgtgcatacagtgggtgcccatttgttccctgcccacatgtctcttgagggttgacccagtgccagccactgtgggcacagcagacccaggccccaggaattcagtcaagtgtcagtgcccaggctccaccccagagagcctgatttaacaagctgggcaagggcccaggcactggtattctctaagagcttcctgggtggtgccaaggggcggccagggccagccaatgaacggtggcccttcatgacgcagagatggaacgccaagggccaggcgtggccacgtgctttcccaccccagctcccagcaggtgattggctagtgggggtgctctcactgttgatttccttcatcacagctctggacattctcccccagttcagactgaaatacacacttgtgctgcacaaggcggggtccctggctgggccatgactgtcattctgtccatccccctgcatgacagcgattctctctcatcagacacagggtgccatggttcactagggaggtgtggggattcacgcctcattaacttcaaggctgggatctccagaaaggataccctctcacactggctgaccacctcctttcccaccttgggggcctcagccaccagaggctgtgtatgcccagcagagctctgagccaacaatggcttatgttctctgcaaggaatatttctctgcaaggaatatttcatctcattttatcagtaatacagagcagtggagcgatggtacctatgtgttctaattcataattttacagtaattttagaaaactcaagatattgggtttctttccattagtgagatggtggcaggcagtaaagcccactgtcttcttataattggatttaaattgttttaattatacagcccatattctcccagtaacataccatctctgtgagttaatgggctttgaaatcttcttttgttccatacactgtagatacagatttttttgttaaatgatttattttatatatagaaatccagaaaatttgctgtgaggtagcttaagatgagaactgggaggttctgttctgttagaagaaggtgaataaccctctgcagaaaacccaaccctaattcctggatggaattctgaacatctccaaaacaaggttttaagagcacaagtgatggagagtgctatcagcagagagaacattcgtgtggctgaaaggctgctgcataaagtcctctgttgatccttcagtggggatagtataaaggaaatgtccattcatttcctgagtgcctactgtggactggccctggccttgggcatatacagcaaggaacgccaggatctttatctttaaagagcctgtgcttttcacaggaacaaacatttgtatttatgacaaataagacctttcaatggtcagcccttctccggaatgggctgtcgggccggggctcacagcgcacagggtttgcccactgctggggctccctcaatgctgaggggtatgctgccatggagggggtagctcgctacccgactcaggctgctcctgggcagggaagcagcgtgggctccctagggcttcctggaggatgggcccagctgggccaaacttcctgttctctggatgtccctcaggcctgcccttcccactccgtcctgggggcatggccagcccgtgggtctcagtcccccttgggtatataacagggcccagccagccccttaactgggttgggctatcccagttaggccagccaagttgcccaaaagacttctgaggcttgacagaccttgggtgaggacatagtggagtgtgtgtgtactgggaaaggagctgggttcatcttgatttccacctcacttccttcttggttctctggacctggggtagaggcatcactgggacctggacttggacctgctggctggcccagcactgctgtgtggcctttgtgagctacagccctctctggtttctgacactggctgtgtgcagcagtgcccgcagcatgagggccgtgtgacctgcctatttgagtactcccctctcatccctgctcctgaacacatggggcacttggtttggagcccccactgactgagggtccttcaacagtgtgggaagtctctgcaaaaactagggagtaagcagaggtggatgaggcccggaaggtcacaccagcccctcagttggaggggcccagggtgactcttctttaaaagctcccagatgagaacctcaagctcaggacttgctccccatctcacgatagaacttctagaattagtgccctaaaaatcccaatccctgggctgggcttggaaactctggcacagaatccaaggcaaagatgctccctggaaagtccctgaggccagatccctaaattggggctccacagactaagaactgcaggcgcacagctcttgagcctggaaaccccatttggaagccactcggtccaggccctttgagcccagggcccctctctgggcagacagggctgggaagaggggcagagctgtgcgtctaccccactgcccgaggcaccaactccgcagatgtaaatgccaggctcatagcaagagactacgtgttgtgaaatgtgtccgtggttttgtgacatgttctctcggtgtgtctgttatttacagctggtgaggagggcctagctctgggagccgcaggagagggagtgctcaggctgagggaaagccgtggccgggagccctgtgggggaggatgctcaccctcactggctgctgaaaagccacctttaaggtccttggttaagcatttccctaagcgggcccttctggaaacgtgtgagggaggggcacccgcgtaagtacccagggtcccaccagggcctcatcctagtcccatcttctcctccatcctccgggactgtttagtgggcagtgcaggctctggggcatccagagctccctgtcggtggtagggttttcttgctatctctagaagcactctgctccctttgtttttgtgttttaggggactaagttgaaaggatggacctgggggatcagggacagtccctggagcagggggtttcttaaatgaaacctgaacaataaggaggagggaggatacacagcatatgcaaacgccagaggccaaaggacaagtgcccaggaggaggtaaagacagaagggcgagtgggggtcggggaaggcagggctccctctgagagccaggggattacagtagctagcctggatctgtctgctgtagggactggacagacaggcccactgtcaagggggacagggttgggggctgcctgtggtccttgactaggaggaggcctgagcaggagtaggctcctgagaggcagagtgaaggcctttctcttcctcccttgacaccctccaggtgtttgtccagggccaccgcctccaggcagcttcccgctccagtcctcatccagttgctctgctccctctttgtaggccctggctgccatggggacttcagcaggcagggccatcttgcctttttccttcttccctcctccccttctagtttttggttgtatcaaagttattcatgcagatagtttcaagagcccgtgacttctatggtctagagaaacagtgactcccctcccctgccttactcccccggaggcccctgtgcccctggagtattcacctgcagagttcccaagtgcatgcttggctccaccccttgatattccccttgtggacgtctgtattggcttcttgcctcagaggaggggaattgtgggctctctctccctctgtgccctgcatcctgccctctgggtggcaggtcatgacggtgctctgcagtctggtcagatccgtggtgcacgttttctgcattaggcctgtgtcaacacacagcacagcccagttagggaagcgctgccttagcctttcctgtccgatattttgcttcccctggagttgctgactgactttttggtggttcggggctttgcttgctatgcatctctcctcatttcatccccgcactctcagctgggtgtctgagtgtccccttgctctgatccttgctcagcaactcctgggctttccattccgctgcttggctgcttgaccttctcccctggagcctcccaactgctgcaaggggcactctccctcatctgtgaggctcactctcccctcctccagtccctgctgtctccgcctctgtgagttcttccctgggatccatgcagaatttcaccctgctccccaccccactgccgcccctcccgtcctcctggtgctgcctgtctttctccgtagttctcatctccttttaataggccacttggctggacgatgggttaaccttgttgttgctcgttcacctctatcccaagtggaagcgttaggagggcagggattgctgtcttttgggtcctcatctctagcgccgtgccttgcatacagcaggtgttccatcaatgcaggttgcatggaggactaaatacctctgagctggctgccagaccccagaccttgacacctcctcttgaggtcactttggtctgctgactcccagcctccccactctgctcgttccctcctttgctgtcgtgggttcctcagaaaggtgcagctggcctcctcactgcctgtgaggctgctcacatggccatgcctgagggccggctctaggttctcctccccagcaggaggcaaaggcctaagctttcttcctcggtgtgcatcctgcagtgtggttctgcctgcctagcccagccacagggtgcagtgggaactaccacatccctgggagctgcaagttaattagtgtaggtggagccagcactgggtaatcaccgaatccactccccatgggcaggcccgtgccaatccccaggcttcccgcatggggctttgaggtgccctggcctggcctctgccagccttggtggcttctctcaccccatacctcctcctcctcctcccctgccttcccttgcagctcaggagatgtttctcgaaagtgcaggattcctgggaggctcctaggagatgtccaggtgtggcagggcagagagcatttgttcacttcacagatgttcactggtgtcttgtttgggccaggcaccaggcactgtgttgggtgctggggttcagggtggacatggtacgtggagcttgcctttgaattgagagaggaggtgagagatagcactttggaggcagaccagctggatctgaaccccagctctgtcaccgactagtttttgaccttgagcaacttactgaagctctctgagcttcactttcctcatctataaaatggggataaacataggccctgccacccagggtatttgtgtgaattaaatacccagggtatttgtgtgaattaaaatgggagccaggcgcggtgggtcacacctgtaatcctagcactttgggaggccgaggcaggcggatcacttgaggtcaggagttcaagatcagcctgaccaacatggcgaaaccctgtctctactaaaaacacaaaaattatctgggtgtggtggtgtgcacctgtaatctcagctactcgggaggctgaggcaggagaactgtttgaacccgggaggcggaggttgcattgagccgagattgcgccactgaactccagcctgggggatagagcgagactcccccctcccctggggggctgttactgtggactcttaggtgggagggaccagcaagtttcccaaatgaattccagctgtggtttcttcggttgtacaggacaaagatccaattcaccctggcctttgccaaaaggggattcagggcaggctggattcggggctgtagagtatctctttgtggctctgcttgacttcattttgtacaggctccttccacgtcatccactattcgggcttagcaaaaatggcagagaaaagaccacattccctttccactcgaggggaaagaggtcttcagaggactctgattggcccaccctggttcatgtgcttatccatgaaccaatcagtgcaacaagggaatggatatcctgattggcccagcctgggtcatgtgcctatccatgaaccaatgagtgttaccagggatgggagtatcctgacgggcacagcctgggtcatgtgcccatccaagagccaatcagtgttatcagggaggagtattttcattggccagcccaagccacgtgtctcacttctttccaaaaccaggtggaattagaaagaagttccaggccaggtacggtggctcacgcctgtaatcccagcacttcgggaggccgaggcagatggatcacctgaggtcaggggtttgagaccagcctggccaacatggcgaaaccctgtctctactaataatacaaaaattagccgggtgtggtggcgggcgcctgtaatcccagctactcgggaggctgaggcaggagaatcgcttgaacctgggagaccgaggtttcagtaagccgagatcatgtcactgcactccagcctgggggatagagcaagactccatctcaaaaaaaaaaaaaaaaaaaaaaaaaaagttcccaaagggaagagaaaggctgttagcaggataaggtgagcaaataaactgcgctggacattcagaactgtaacttccaggccaccacgaggagcagttcttccttggtggctgtagacattgacctctggggttctcccttgtggttttcaggctgtctaggccacccctactgatgggagttccccgatttcaggacgtgggagggtcagtgcctccccgagtgctggctttctgtggtgttgtagctggggcccagtgtggttggaagctgtctgccccttacaggatggtgtccctgtgggaaggcccgggctacagactcctgagcgcacaaagtcaaggatcaaagcctcccagctcctgcctggggcggcacagccactctcccaggcagcctttggtcctgtcctgcctacatgcaggttggagtggccggtgggctcgtggggggcctccctaacaggggatgggctgcgttcctgctggctggcttgtggttagtgttgttcgatgagtcggtcagatagagagtgggccaggctggccgggcaccgtggcttatgcctgtaatcccagcattttgggaggccgagacgggcggatcacgaggtcaggagatcgagaccatcctggctaacacggtgaaaccccgcctctactaaaaaaaaaaaactgcaaaaaactagccatcctggtggcgggcgcctgtagtcccagctactcgggaggctgaggcaggagaatggcgtgaacccaggaggcagagcttgcagtgagccgagatcgcgccactgcactctagcctgggcgacagagcgagactccgtctcaaaaaaaaaaaaaaaatagtgggccaggcagtcagcagggctcagggtctttctggaaatgcctacagatgagtgggcgacgcttacatgaaataacacaactgtcagaaacaatttatagccatgttcccatggagccaggtctggttatgactctgcgtgttgccttctggcaaatgaggtttgtcacctaatcattgcgctttagtacctgatatgaaaaccagccctggagcctactgggtggggacaccacggggttccaggcacccagaggacggcaggggtatggggaggtgtggaccgggtgatggtgggaaacagcgttaattgtcaccgtggaggaggccgggttgtggacatacacttgtatttcttcttcagctgcctgcttgggctctagaggagacccggagcccagggtgccactgctgcaaggagcactgacatccttagaggcccccactcccagccttctgtttcctggatgtcacggttcttccattccatcatgaaatcctgtccaattcctaagtgtgtgcttggccaggggctggggattacagtgatcagcctttagcctctgcctctgccattgtgcatcctattagtgtttctatgtgttattgtgtacattttattgcaaacactgtgaaacaatctccttcttagacacaacactggacaagtaagtccagtgatcagactcctaggagagcaacctggagttgtctgtgatagagacacagccttcagaaaggtggagtggagcagcccctgccgcccttctgtcttcaatgtttgggatcaacaggtgtgatgttcatgtgactcctggattcctgccccttcactggctggttaggccccatggaaaccatactcagctggactagggtgagagggcccctctaagggtttaccctgtgttgggaccaggccaggttcctgcatacccagtcccttcacagtctacccagttgtggggcaggttggagaggggttctttcatgagctttagagaagtggccatgggaagtgtgaggagtttgaaagagtcagatactttcagagtgttgtcccagctctcccctccatggccattggctgggcatctcttcatatagctctcagctgtttgtcaagggcctgctgtgtggaggtctccatgctggatgcaggggatatagcagtgaatgagagagacctcatgagtgtgtttcttcatatctaaaatagggacagcaatggccactttccaggctggggaagaatagagcagtatgtcccagattgaattctgtacaactgattttactgaatattgcaggagaaaacagcctctgtggccaaatacatatgacccagccagatgcttctcttgaggacatcaccacatacatcagcatatttaaggctctgagaagtcctgcagtaaagaagcccattaacttttgtgagctcagtgtttgcaggctcagttgaacatggaactttatttggcagagcacctattaacatcctgtgtaattagtgctttgcaaagcccattttggaaatgccaaggcagcataggtaaaataccccacagagtgcccagcacctgggaggtactcaataactgtgagtctttcccccacctggcatcctggaggaggcagagggataaggcagccctggctggctgcaaatcaactcggaggagccgacagtagctaacactctggttttaatggttatagcaatgaaagtctaagtgagtttaattttaaaaggcaaggagtgatttcccctatgctctgccaaaatgggacttcataaatattacagcaggatgtgctaggtggtgggcatatctcctggttgagcaaaatctctgcaaagcaccatgcagcagcaaatggctcctcccaaaccacactcctattcttgtttagcaggacatgccacttgacaggtttacctgccagcaccgctggctggccaggagatggcagtggatttaacaggcctgtgttctggaagtggggagggactgaggctgtgggagggctctgcagacccggccacatcctcagcctcccaaccatggtccattatcagggagcctcggtttcctcctctggaacatggggatgattatgcccagcattgtgtgtgccttgaagtagggactgcatttttctcccctatgtccccagaacccagcacagatgaaagtcagaattgggttttgaaggatgagtaggagtttcttatgcatacagtagaagaagggcatttagacagatagccctaaatgcctttcttctacttcaggtaaaaaggtgtggaggcctgaaaaagtctgacatgtgacacgaaccataaccaggcaaggagcgttagtcataattgagcaagtgacagaaaacccttttcacttgggttgcttagggcaaccttggggatctgctttctgtgccagaagagacacctggaaggaaagcatggtgcatgcggagacaaaggcgatccccacccccatccactctgggaactgcttcacttcatctagacagccagcagcagcagtaaatgagggagatggaacgtgttattttaattatatactctcaccacctaattataattttaattgatatgtgagcaggtgctatgctcttcaaagcagtttaaggcaggcatagtccccggaaatggaacacagtttgttctattcattagtcaagcagatggataggccaggggactagggggccaggtgtggggagacagcctttgccatgagtgatgtaggaggtgaggggcttcccctggccaggcagcgcacagcttgagggaagaggagagaagggagggggtggcggctggcatctagtgctagtgggttgattcatttattcattcagctatgcagttgacccttaaacagcattggtttgaactgtgtaggtccatttacacaaggattttctttctcctctcccaaccctgagatagcataaccagcccctcttattcctccccctcagcctactcaatgtgaagacaacaagaatgatgatctttatgatgatccacttccacttaatagtggaatagtaaatatactttccctcttccttatgattcttttctctagtttattgtaagaatacagtatataatacattcaacatgcacaaatatgtgttaatagactgtttatggtatcagtaaggcttccggtcaacagtgggttattagtagttaagtttttagggaatcaaaagttgtactcaaatttttgactgcatgaggggtcagcgccccaacctctcattgttcaagtgtcaactgtactttcaacaaacatttgttcacagcttgctgcaaggcaggctctctgctaaatgcaggggattccaggatggctccagcacaactcctttcctcaaaatgttcccagtctagtggggaaagtatagatatggaaacaaatatttatagttcatggaataaatgggaaattatcctagaagcagcatagactggcaggaaagttttgctctctagtgaagttagggaaggcttcctgaaagacactttagttggggttttgaaatgtagataggagttgaccaggttgcctaagatgagggataagagatggtggtgggagatggcattctaagcagagatgagaaacctccatctgtggggtgtgcagggagtgcctggtggtttgctggagcactggcctgatgggagatttggtagaagatgaggctggaggtttgagtggtaggtgggtctcccaggagcaggagctggacctcatactgatagcagagaggagctggaaggatttgaagctgggggtgatgtgattggtttgtgtttctgggaggccaccctggtggaaggtgggctggacaggctgatggtgcagccaggcggagaagcgaggaggggctgtgtgaaggtcagagcaggagcttggaggttggcttctgggtattggagtgagggaaggggaagatcagggtgaaggtcacgtctacgcttgggcctcagggaggccatctttgagatgaggagtcagggaggagcaggggaagatgtgaggtcggtgtagaccatggagtttggggtacttgggggacctgggtgaagcctcaggaggagaggggtgtgctggaggcatcacttcgggagtcactgtgggaaggcagggaaggaagccccagaggggatgaggcaggggcctgggacacagtgtcaattccagggagctgagttcaagtgggagtttggcttttaggaggcttattgggggtgacattgggatcttcacctggggaaggcagggaaaggagtcaggccaggcaggacacaagccaaggggtgagaggccatcccaggggaagccccagcagacccctgggagctctgaggctgagtggcccttcagaggcgttctgagctgcagggagagggttggacccttcatacctcatgccgctgaatcctagggggtccgtctagaattctccttcaggaatgcatcctcttcctctccaggggctgttcttgccctcccttcaccgtcctggggcagccccctcctccagcaggaagttggcctggattctggaggggtcaaggaggggctgttaggaagccaatccagccatgggggtggagaggccagggacggcccctctgggccccaccctgccattggccagctgcatgacctcggggaagtcacccctggcctggactccgggtttcccatctctgaaatgaatggtctcacattggcaggtgctgtggtgttgcaggcgtgccctgagccctgcagcctccgtctggtctgtcctgactgtcggtttctgctttctgtgtcattcctgtccaacaggatggccagtgtctcaggcagtaggcccgtgtctgatacatctctgcacaccatacagttcccagtctgacctggcagagacagcggctggatgctcatcactggagaataggcagtggctttgcttttactgagcgcttgttctgtgccagaccagttactagcagtaggtgtatgtttctcatggcaacttgtctgcagatgaggaaatggaaactcagacacttggtacctgccccagggaccagaactgggatagaagtgactgctgagctggggacccaggcttggtgaccccaaagtctgaactctttctgttccccctgctcctggggtcccaagtcagtgttttggggagactaggagtctctgtctctccagccctgtccagtggagggcactggtggaatgtctggcactgtgttgactccagccctccagcttccaatggggttgtgggcactttgtacaccttgtggagagggtgggggcatcacaattgctaccaagcccacatactgctctgggccacccccttggctgcacacggagctgctcaggctcagcaggtagtggcctccctgggtagttggggaaggggggctctgcaggctgggaggccctgtcaggacggctctgtgtgcctcctgccccagccagggctgtctagcatgggagtccaaggctggaatgcccagtgagaacctaggagccacttaaagaggccatgatactctgggcggctggcagagaggtgagggatgggggaaaggtggaattagcaacacatcccgtgagccaggccaagccagcagctctacatgggtgacgatgatcagcgatgggcttccagatgcctcctgcatgtgccatccctgccacagcctccctggattgtttatggtgggaccctggtggcccttctctcatggtgttcctggggaggcctggggcatgcagcctgcccttcctgttccttccttgctcactagtcctggcctccaggccctcctgccccttggctgcgggaacttgctgtggtcccctagctctctgaggctaagctcctgcaaggtgacgtctgtgagatgagccatcacctgccagggcagttgtaccaggtctgtggtgtgcccatgtgcagcgggcttcctggacgtgctgctcctgtcttatgtggcttgtatttgccaggaaacctacttccctcggcatctggcctcacctgagatttgctgtgagccacaccaggattattttctagcttctcctcttcctggctatgtggcctcacacaaagtatgaaggtgatcttggcctctacttgctgctcggcgctgtggggacggatcctgatggcagcctgtggttggggcaagaacggggtgagatgctgttcccggtgcttggtcagggcttggaaatgggcgcatccaccatcaatgtgactgtgcagtctccaggggtctgctcctggccatctgtcttgagccctgggctgtgggtgggcttgctggaggggaactgaaagagggaaacgtgtccagccctggtggcattgccagcctgctggacccagcgtccaaacttgtggggtggccaggacctcctgccttctgcagaggcctcctttgcctgcctgaggagcttgaggggagaggagccccaaggaaggctggtaagaaggtagggaggaagggaaattggcgcactgcaagagggaagggtgtgaaccacccccgagatgggaatggtgagtctggggtcagcaggaagggctgaggccctccccggggctggggatgcagaggaaacagagatgcgctcctgccctgggggagtcacggtctcgtccatgatacaggccctgatgcctgacgctactgggatgggggaggggaaggactttgtggggaggcaatgaggggaggaaagtcctgctggctagctcagcatgcagggagggagcccatcctcgagatcagagtgtgggaagtggcacaggagctgaggagagggccgtggtggtcagtatctggggtgggtcatgcttggcctcacaggctggcctggaagggcaccagtgatgccaaactgtgatgtggcctggtttgcttcaagggaggtggccacctccaacttcataaggaagatccaggctctgggtccttggggttggattctgagttgtccagagcatgagcaggggtagactggcaggccaatttgagcagagacccccagcagggcccttctgctgagactttgtgtctgggacctctgggttctgccagttggctggttgggggtcaggggtcagtcagtgagtgtggaccaggggatggtcacagaaggtagcatatatgttcagaaaggtcatttgggtcattctctcattgccagctgagggagtctgcacactcggcccacccctatcctttcaccagtaggcagggggctccttgccaaagcccttctcaggctctggtccatggacatcagcgggcccccttcctcctggcttccatggaggcatattggggtattcacccagtaaccacatgggctgtagacatctggctagttggggttggcggttgtttgtaaccacagcatgttcacttgccttggagggccctagaggagggcccatggtatgacagctggggagaggcagcctggccaaggcaacctggtggaccctgcagcaggcagcatgcatgtctgtggtcagcggggctggccagggcaagggaaccaggcagccgctttatcactttacattagagggctcgggagggatgccctgaagctgtccctgcatgtgggaggcaatgctggcggatatttgtctcacacccctgcttctttctctgagccagggctttgctttcctcctggccttcttggatatggtcacccagcccatagtgacagggcttttgggcttgaaagacactcagtccttatagccttgggtgtccccagttcagccctcaaaatcccaggtcttggacttactctcttgtcaagtgctatacagggaggtagaggctgggggtggggtgacccgggggtcctgggagggccttagagctaaagggcctcatgcagagtccccaagtcctgggagtctcacagcttacaggaaaggtgagtctgagcatgttggtgggggtggaggggggaacggggttcttgccaagcacacatagagttccaaggctcactcttgacctgtgaatcatttctggggatgtgagataatctatagggaacctctccttaatggagagtggggcaccagccagctgcacataaaagtgcttcctgaatttttctgattgtaaaagcaatatgcgaggatcacggaaaaatgaggacatgcggaaaagcccatgaaagtgcttcggtacctggcaagataaatgctgccaggaacccagccatgcagagcaccgctgctcatggcttccagcctctcctcttgcagacttcttcacatggctgagcgcataccattcactcaattttgtcttcagccttcaactttaacacttttatttctttaaatgtcacaaataatacacaaacacatctcattatgaaagactgaagaaataattaaaagaaacaaaaggcccgtttcctgcctcagagggaaaactgaaatcagcttgctctatattccagcagaactttccctctgtgtttacatttagagaaatgtaacctacacacataacagaataaagagttttgctttctttttgtgtgttttgtatatataaataatgctgactacacctatttactgcacttgcttcttttcatgcaccaatgtcttggtgagcttgctgtgctatttcatataaatccaccacatttcaaacagagtttcatgacatacatgaaactgtgaatacatatttaacagataccccccttaatagatagttaggttgtttttaatttgcacaataacaaaccatattgtcatggaaatccttatatatgcctatgtatctaggtggactctaagttgtggaattgcttgtctgaataacatgcacatttaatttaaaaatggcttctgccaaattgtcttccagaaagtggaatcaatttgcacacccagcgacagggtaagaagagcacccactttttcacattcttgccagcacttgatattatcagtcttaatttttgtcagtccaatggctgataggcggtacctcattgttattttcttttccatttccctaattactgtgagccttctcttctacctaacacatgcagttctagcagatcttgttaacagaaatatcatcttgtttaatttatttatcctaagagttcactgcaaacacaattaacaatggcattcttctccagtaagatacagcatttaatgagctcagtgataaaacttccgaaagagcagtatataggtgtccatgactcaatattggcattgattgattgtgagtgctattgttctcatgtgggtttgctctgctttttggctgcttggggaaattctttaagatgctgttgtccaatggtggggtctctggcagtgggcagagtaaagtctgccgtcctgatgagggcatgctgggtagagataactaatatataaccagtgttacagcaagacccttggatcctctaagcagtgggattttaggctccatatctaactcaaaataacaacagcagtaaactatagcataaatgtaaggatgtccaacaaaggtgttcattttcgcaggatgacttactttgaaatcaaattctttttgttgttgtttttgagatggagtgttgctctgtcgcccaggctggaatgcagtggtgcaatctcggctcactgcaacctctgcctcctgggttccagtgattctcctgcctcaccctcccaagtagctggaattacagtcgctgccaccatgtctggctaatttttgtttttttaagtaaacacagggtttcaccatgttggccaggctggtctcgaactcctgacctcaggtcatccacccgcctcggcctcctgaagtactgggattacaggtgcgaaccattgcgcctggccaaaataaaattcttttaaaaatgtgttcttgttttagggccccacttggctggtttcctcctgggtaacctggcacctgctccactctcgtctccaatttaccacgtgatgtgcccacagctgtggcccacacctccgacattatgtgcatccatgggacttcagctccctgattattgcaacctggcaccatttgcttggtccaacagtactccattgcttctcttccaatggcaaattgttcttctctttatttgatgctctttggtctctctatggctttaaattttaattttggtcttatggacgatttgagctgccttctactttttcattaaagtttccctccgatttttcagaatttgttcatgtggttcagaccgttttacccttcttcaaactttcatacatttgattaggtaaataagtgctcagtaaacacatgcaattcttgtgagtagacactagctacttctcatccactactgttggcaattatacatgaaaatatatgtctgtcagtgggtgctttgaatacatagataaggcaggagctcccatcttcataatatgaacagttaccaacccggggcatagtgtgtctccccatttattttgggtctctttaatgcttttagtaaagttgtatgtttttctttgtgtaggtcctgcccatttcttactaggtttatccccagggattttattgattttatttctaatacaaatgagctttcttttagattacattttctaattgggagtgctcccatacacgaaagctattgatttttgcatattgattttatatccttgagttttgctgaactcttgtatgagttccaatagtttattagttaattctcttggagttcataggtagatacctatatttgctacaaattatgtcaattttgtctgtcctttttcaacacttgtccatatttctttttcaggtgctgtcacgttgtctgggacaatgctaaatatttttagtggtagaacattctacagtttcccagttaagtgtgatgcttgttgtaggtttctaggagatgtcctttatcaggttagggttgttacttttgatccctagtttaccaagaattttacaaagagtatgattttagccacattccaataggtgctcaattcaaattaatttctgaatagtttgaaatttctcttgttatgttcttttaagccagcaggtataaaaaagaatgttttaagtgttctaagtagatagattgggaaggaggtttcttttattgttaattcctggtcttattgcattggacttcattaatgcacaatgaatttttgaatacctttttcttaaggattttactgagatttatactgtggaaagttgggtgtacatggaagactgtgctgtctcttttgggtctcgagagggagcataagtggaggttgagtgtacgggctttggggccagttcctgactggaaccctagccctgcctcctgctggccgcaggatggtgagtgagttgctggaaatcagtttcattgtgtacaatgcgtgggacagtagtgcctacttcatggtagtgtgtaaggatgatattagttaatatatgcagaactttaaaccagaacttagaatgtaagtatttaatacaatattgttaggtaaacgtatacaagtgagatgtgcaaatctttcatattattttttgctcactgaatctgaaagaaaaatgttaaaatcatctttaagattgtggattggttggtttccccttcaattattgttaattttgccttatctattttgaagctgtgttgcaaggttcatatagtgtcatgacttatatttttggtgtagatggtgtcttttatcaaaatgaactctccctgttcctttgagtgcttccaccttgaattctattttgtctgataaacagcccctttttctggttattttttgctaggtgttgtttttctcatcctattatcttgaaccttcctgggtgtttgttttgtatcttttgtaaaaagttatgtcaaaaaaaaaagttatgtcatgatgaaaaaaatctcatttttttttgaagattttattagcataacttaatctatttacttttattgagatgattgatatgcctggacttttccttgccattttattttgtgtttcttgtttgctatgctttcttgtgctacttttgccctttcctgccttttattgaatcaactgtgttttctttgtccaggtttttgttccttaaagcagttttctcaacagcggccctgtgtcctttgggtgggactgttccttgggctgtgggagtctttgctgcaccacagggcgtttggcatccctcaccctggacactaagctacagcagactccaaccgtcttgtgacaaccaaaaagtcccctccccctttctcccagtggagagccatccactaagggttcaataatacattacatgtttgtttttctagtgactgcttatatgttaaagatacctttatgtttacacgtgtctctcaacgtataatcagtgtctcctggaacaaattgagacctttctatgcctcaatgtccttctgccccgagctgtatcactacctaacatgaggccagctgggattttagttccaaattttaatagttaataaaaaccaattttttttttttgagatgagtctcactctgtcacccaggctggagtgcagtggcacaatttcggctcactgcaatctctgcgtcctgggttcaagcgattctcctgcctaagcctcctgagtagctgggaccacaggtgtgcaccaccatgcccagctaatttttgtaattttagtagagatggggtttcaccatgttggctgggctggtctcaaactcctgacctcaagtgactcgcccaccttggcctcccgaagtgctgggattacaggtgtgagccaccatgctgggcctcaataaagttttaatgataagttttagttttttctcactactgcttttgcattccacattatgttctttgattcatttttaaaaattgtggtaaaatgcacatcacatgattttaaccattttaaagtatacacttcagtgacttccagtacattccgatgttgtgcaaccattgccactacctaattccagaacattttcattatcctgagaagagaccctgtacccattgagcagtcactccaatttccactcccccggccgctggcagccactcacttctctgctctctggattcatttttgtggttgctggagcataccgtttggtaattctttccaagagggtttgtggtggtgaattttctgtatcttcacatttctgaaaatgcctgtttccttcctaaaagctgagtagagaatttaaggtttatgccatttctctcctaagctctttggagatattgtttcattgacttgtatgcatccatgtcctcaggaacagtgactgctaagtcaaatacagtgtgtgctctgcaccagtgctttatacatagtaagtcatttaattctgctgacaactctgtgaggtcggggctgctccccacttaacaggcagagaaagtgaggctgagtgaagagaagccccacatcccttcagctaggaaagaggccaccccggctctcgagaagttgccatctactgctgcagcttctgctcctctgtaggcaggctgtgttgttttctgggataatttggcatttttcctttctccctttgatttttatgttttctttttcatatagagtcttgctctgtaacccaggttggagtgcagtggtgcgatctcagctcactgcaacttctgcacctcccaggttcaagtgattctcctgcctcggcatcccaaggagctgggattacaggtgtgcggcaccacacctagctttttttttttgtatttttagtagagacggggtttcaccatgttggtcaggctggtcttgaactcctggcctgaagtgatctgcctgccttggcctcccaaagtgctgggattacagtcatgagccaccgtgcctggctgtcccttggattttgaaatttcaccactctgtgcccaatatttatttttattatttatttatttatttatttatttttatttaaaaaaaaataattcaaggccgggcaaggtggctcacacctgtaatacgatcacttttggaggcaaaggtggctggttcaccgggtgggggggactcggtgaacaaccttccacaattggggaatattccagttgtacaaatggcatgaacgcttccggagcaaatccttggaacgtcttactgtgtggagccccgtgcaagccctccaacaaaaaaattaaggtgggggggcagagcgcgtagatgacatggcccagaggtataaaaacaaaaatgtctgcgcggccgttgtggatcatctaagccctacggccacttaagctgggtgctgtttaccaggaaccgaacgacggggcgcctttcttttgaagctgaggtcaaggaacactaacgtcaatatgggtgtaaggatagcgttactcattattagggaaggttacgatcctatacatgctgtagtacggaggaggctatcgacgtattgatcttgaaagagaggcaacgcgaacaggttatctcagctgtcgctgagcgcgatatacaccgcttatggatagggacttacggaatgtgggatctagaatgaatatagccacagttctggagcgcatgttgaagtagtgatgatagagaacccatcataactcaacattcggctatacatattagtgtgagtctcaatgttgggtaatgtcgcagactattctcgtgagtannnnnnnnnnnnnnnnnnnntatatgaactaccttggacaggaagtaaacccacaatcacaaacgtttgtggagtgaaatgatcacagtcttcatagctacacacgcatcacacttaagagtatcacgcaaagttagccaaggactacaaagcattgccagtactctagcactcactttccttttacggatgcaggccaaaagacgctacagaagtctgtgtacattttggatcctattaaaagcttttaatgtgtccaggcatggtagctcatgcctctagtcccagctgcttgggaggctgaggcaggagaatcacttgaaccaggaggtggaggttgcagtgacccgagatcatgccactgcactccagcctgtgcaacagaacaagaatctgtcacaacaacaacaacaacgacaacaacaacaacaacaaaacataattctactttgcatgtggtaggttctgtcaatctgaggacttgtgtgtttctgcattttcttttctaatttcccatattctctcaggtctctttttggaattccttttaggtggtggttggagcttatatccttcatgtcttttaatttacttttatccttccatctctgggtttttgtgccatctgggagagttcctgtttcagccctctaggtgactaatttgatcttcatctgttccatgctgctattcagcccctttttaaactttaatgatgaaatgtttggttcccagatctagttcattcgttttaaatggatgtgatagcctctcccctctctctgttttctcgttcaaagtgtcattctgcttgtcctagtacccaagtcctcaggggtgcgttcgtttagcagatgagtttggtgtgcctctttcgacgtgtaatcttcttaataaggtgggtgattctgggttgcctgcttgtctttgtgtttgaaggtttctgttgtcctatctgtgaggctgaactcacatactggatgggaagagctctgcactgtggtgccagctggagcagatcccagtctttgggtatgggctccactgacctcctgtgtgttgttgccactcgagggctgtctcccctactccctgcttctgcctgcgggcagttgcttttgcaggtcactgcttggcatcatggccctgccagccaccctcacatttgatttggggcttcttctgggtcctcacttgctgggcttcccagattggagctgccagcttcatggcagccctctcccggatatgctttgccctgtggtaccatttccaatccgaacccatcaaccttctgccttgcaagcattcttcatgattcctgccctagtaagaacctcattcttcttcttttttaaaaaatccagctcctgcaggaaagaaccccattctggtttttcagcactgctatggatttttaaaaaagtgtttatgttacttttagggttttgtattgggaagaggcagaatgtgaccccaggccaccattttggcccgatctctattcatttttactgggtgaccttgttgcagaagagatttataatgtggcacatcatttcatataattaccatgccatggtaattatttcctgggtcattaaaatttcttcataatcactattttaatgactgcataatatttctgctggtgggtacatctgaattgactttgctgtttcctttttcttcccaacatttttttttttgctttttttcttttttttttttgagatggagtctcactctgtcgcccaggctggagtgcagtggcgcgatcttggctcactgcaagctccgcctcccaggttcacggcattctcctgcctcagcctcccaagcagctgggaccacaggagcccaccaccacgcccagccaattttttgtgttttttagtagagacggggtttcaccgtgttagccaggatggtcttgatctcctgacctcgtgatccacccacctcagcctcccaaagtgctgggattacaggcgtgagccaccgcgcccggctctctccgacattttactataataataataataacaagccacaatgaacatcttgtgcttgaaattttgtccatatttggaacattttcctaaggtagagtcctaaggatgtgtgtgtgtttgttaaaatgtacataacatttaccattttagccatttttaagtgtacatttcaatagcattaattcacattctgtgcagccatcaccaccatccatctccagaactttttcattttcccaaacagaaatactatagcacttaaacagtgactccccattccttcttcctccagccccgcaaaaccaccattctcctttctctccttctgactttgactactccagatatttcatacaagtggaatcatatagtacttttgtgacgtgcttacttcacttagcatgaggttttcaaggttcatccgtggtgcaagtgtgtgtttgaaatgcccattctgtcacccctacctcctggctgccctccctgagatccaccctctacaatgtttgggaatgcacagtaatctctcaggaggtggcctgggtgtccctcttcattcctgtgcaaaaggattcttcctggagactctgccatcctcattcgcttagtgattcatctcagagctagagccaaatgaaatggatttcgttcccagcagggctagtttgaaagtttgtgctcataaacttgctttaccgtaatctataaattgagttttcgcgctctgccggctctatttctcccacctctgccagatgtattgccacattgggcctctgggcccaggcacgaggggaggccccaggatgctctgtgcttatggaggtgcagcagggattggtgattggtttgaacatgtaattgcatttcattacttgattactgctgctgctgtcaccgagggagctagggagctcctggtacagctgcttgtcactgcagttcatgttctaatatctgatcctaggagggaatttgatagagtagaaggaggagaggaggaggggcagcccctgggcaccctggacagcagatcctcctgaaagccatcagcagtgctttcaccacgctccctgtcctcgtcagcaacttctgcagacaccaggattgcccacctcccagattatctcatggaagcctctgaggcagctgctactatttattggaacctctttgcctaaagtcatagctggagtgtgctccccatggtgggatgggtgctttacccacaggagttggggggagaggggagggtagctggagttttcccggggcctggggcagggggaggggatcccaccccttcatcccatgccaggcagaaaagggtggaggcaacagctggagacctggattgcattcctggctctgcaatcctggctgagtgagctgggatgagctgcttaacctctctgaccttggccctctcactgtaacacccctaggttgtggccaggttgggtgaagctagcacttcaggctggtctccatacttctattcccaacacaattgtcagagtgagcctttgaaaataaagggaggctgtgactcttgcttacaacccaccatagctccccatttccctcagagtcgaagcccaagagaccctcatgatcttgtctcattttggcctcatctactccctttctccctgggtgcctccccttcagccacagtggcctactccttgctcctgcagcaccccaggtatggtccagcctcaggacctcagagtcgttgcactcccagttccccccaccctgaacgccctttctgggacattcatatggcttcccttctaccttcactgtctccgtgagacctatcttaagccccatcttaaaacccatgacaagccccaatttcctatttcctgatctgtttttccatagagcttctcacctggcactcatgatgtatatgtatttacttgtttagtttttagtgctttctctcctgctagaatggagctccatgagaacaggttctaagtctggttctcaggtgaatcttaagcgcttggtgaccagtaggtgcttagttgaatgaatggatgaatgaatgaatgaatgagggagtgaatgagtgaatgagtatctagcagattgccctgcctatggtagggtctcagcaagggtgagttcctcttccctgctgtccctcaccctgccatgtcctcaggctcaacttctggctccagggaacggacagggaggatgccaggcctagcctgtgtgggttctcttgtcctcaggccctggggcatccccaggacatcagaagtgggcttttcatagcaggagggggctgcaatctgagctttactcccaacctgtcagcctgtgtggacccctggtgtgggctggccctggcaggcagagggcaggaccttcggagtagccactgcagcagagcacggagcttgactggtgacagaaggtgtttttcagctctggcatggcttctgtgtggcagcagtggccatgactaggtctgagttacatgcgatgtgcagaattaaagccaaggtggggccatgacttctggggtccactgtgttctagcagctgcagcaggttagacagccactcctggcaccagcactcaggtgctgagtcattgccttttcctgcctgcctggagggggccttggcctttctcatgcctctgaagaggaggcaggcagtggggtgaggctccccaagcacctgggcctttttttctgcttggggagcccagcccagcccttcagtctatataagtcaaaggatgcaggtcaggggcagtggcttgtgccagtaatcctagtgctttgggagaccaaggtgggaggattgcttgaggccaggagttcaagaccagcctgggcaacggcaataccctgtctttacaaaaaaaattaaaaaattatctgggtgtagtggcttttgctggtggtcccagctactcaggaggctggggtgggaggatcgcttgaacttaggaggtcaaggctgcaatgagctatgattgttccacttcactccagcctggatgacagagtgcgaccatgtctaaaaataaaaataaaaattaaaattaaaaaatgacacagtttggtggaggatcccttgacctcctgctctttaagtcagtcaggaatggggaccctcttgctttcatggcccagccagaagcactggctgagagaatcgagtgtagggtccttgctgcccgaggcctgcccacctcttcttcttcctgccatcccagcagaagtggggtgcaaggatgccagatgtgtgttcccaagaaatgtggcagtatggaggatccacactttcagcaggtgagatgtaattgtgggtaattgaaaaacaccatcaaagctatttgtcataatttttacaaatgctttcttcctgggtcattcataacacttctagaaactcacaggtccacagaacacccactcacatgctttcctttactctgcaggagtctgtcttgctcagagtggggaagggggcttgtggatgagccagccaggcctggaggtgcggcctccctcccaggagggagctgcaagccaagtatctagaatcagagtatgaggaggtcaggacaaaggggcggctatgcagacttgggatgagccctgaagctctgagcagatgcccagggtgggcaggtccggggggagttctgccttctgcagagaggcaaggggtggggagctaggcagctctcttctgaggggattcagatgtgtgttgttctgtactgagtggtcctagggccacgtggatcagaattgccaaggccgtacttttatacagattcctgtcccaacacccccaccagctggactgaatctcttggggaaggggctgagcatatgcattttagtgggggtgattcttgtgattcttgtgcacactcagggtgagaagcactagcttgtaataatgtgcttctgaatgccagcctgtccatgtctcatggaaaatcatataaaagcaagacagccatctcatctggcagctgaatgggagggaggctgaacaggtcagttggggtttgtgggtctggtgagcagcgcccaggagtgacctcggaggatgcaaggctggtgctcaggagccctggggctttaaattcacagtgctggcttattctaggctaggtaccccttgctgtctcaggagctggctccatctccaccctgtgtcccatcttccactggggctctgccctcccgagcctggaggctttgcctgggctgttccacctaggctggggcagctttgaggggcctctgggtccagcactggagaaaggctctttgtctggtttcaggcatgtgcagagcttcaggggccaggctgtgcctgatgggggggattgttgtatctctggagactctggagaacactggcttagactgggttcccttgcaagtcagggctgcaaagcccctgacatgaaggagctgtcagtcctggctgtgagggtgtgtgggagggtggacagtgagcgtgatgtgatctctgccttactggccaaatgtgcagaatgtattggcagctcaaagtctgcctgggggattctggggcacacctggtggcatgtcccagagtgcagcaccagaaggtcatggggagtgttggtcgagtggaggtccccagtgtggaccagagtggttgctgtgctgtctgtgaccagttctagttccctggctatctagtcttatattttgtgatggtcttgctctgtctcatcaaagtgggggatgggtgtgtaggtaggtgaataggtgatggatgggtgtatgtgtagatggatagatggatgagtggatgggttgacagataggagttagaaaaatgggtaaatggatggatggatagatgaaaacctggctgagtttatagctgcctgggtgggtgggtggccagtgggatgatgtgtagatggatggattattggggattggagctggataggtggctggatgaattggaggttggggatggttggatagatggttgggttgatagagtgtgagtgggagtagatagatggatgggtggatggttggaggcagatgtatatgggtggctgaaggaaaatatgggggcatatgaatggatgggtgggaggatggatggatgaaggggagggtgagtgcatggatgggtcacaggtggatgggttaatgtggctggaaggaggcattgtggggcaggaagcagatcaggtgggtgaccaggttcactgatacaaaattaaactgtggccagatatgccaaaatccagttccttgtgtgactcagaggctgtagtagttctgagaggagttccccagccctggactcattagaggaagcagccccagcccccttcctgggccacatagaccatgttcctgccctgggcttttctctgctccatgtgctgatgcctcagccctccttgcctggggtccaggagtgctggctggcgtgtggctatgcctggccagggtgacaaattgcaagaaccttgcagtggctattgggggcgggggctggaggacaaaggctgaggaaaatgggcctttgctttatggggtctccacaaggcaatgtgctaagtgctttcatcatgttgctgtttcatgtttgtgacagctggggaggtatgggccccacagatgaggagtctgaaggtgacttgctcaaggtcatgctgtttgacagaggcagagcctggaagcttgatggaagcagggcggctctgaactaggtgcggcacaacaggatcggatgccagcagtgggcagaaggtcagtcctgggaaggacaggttacatggaggtcctgactgcaggcccaagcaggggagggcttcagggagggttcccatgggatggactaacacaaagccttggtggctctgtgatggatcctgggggctctggctctgcaccatgtggcctttctgatgctcctgcagtaggtctcagggcactgggcagagctccaaatggcagcctcagattccgggccctgcctagagggctaggacagctggcacacatctgaggagtgctgggaaaggggactgttggcccaagagctgaggttgacttcataagaggtgccaccttcagagagcagcctcctcagggggtcttgttctggtgagcagcaggcacctcttgcagcccactgaccctgtccttctaagggcacctgtgccaccatttcccaggcctggcaggaaatgcccccagaacacctgaagcttccttgcccatctctgagctaggccagggattcctctgatatttccccaggccaggctctgtaagcacagctgatcccaccctgaggggtcagggaggcagatggccactgatcaccagagcccaaggagtgggaggagcccttgtctcagggatctgagccacctttatgccacctaccatcatctggagtttctgacttcatggttgggacaacccttgggacctgtcccatccatgctcatgtggggctcattctatggtgggttgcaggcaggagtcagccctcagcagctcaggccctgagcaccagctgaaagcagccagttccacctcttggctacagtatctgaggggcaaggaagtggagcttcaggagtgaagagctggaagccactcatgttcaggaggaagaagagaggaagctggacctgatctgcccttaacaaagaaagataaagcaggaaaaaccgaaaactaattttagtgcattaggctagagatgggagagtgtttatggatcatttagtttatggatggtgataggttagtggttagattagcaggaagccagtcagcttgaaaggagggaattaatttatgagattgcgaaggggaaaattgtttgcaagaaatacaggggttttgttgtaatagcatggagtttggcagaaacaacaagcgccgacaggcccagctgtccctcagggagccagccaccaggagcgccagtctgggggctggggatgtgtgggaagagtgggacgccccagcgcagggtgcagcccagctctcacttgctcctcagctggggagaaggctgttcctctcccacgaatttcctgggctttgacattgaggttttggattggaagagggtttggtgataggcgggcaagttcccggacgtcattatatcttgtgccaaggacctactgaactgagcctaaagagggagacttccctgccacggagactcccctggtggctcttcctgcccctgtgccacacttcaagttctggggagtggggatctgaggaggggagctcagaggcctggagagtcctctgttcattacactaacatttcctatgcatgacagggccagagggactgggttccaattccagacccataaattagtggctgagtgatttggacaagttgttgagcctctaggaacctctgtatccttatctgtcaacatctcagggttgttgtgaagatgacctgagaagatatgtgtgaggagcttggcctggtgcctggcacatggttagtgctgggtaatgatcgctgttagtattttcatggttattttaatggcagaggaattaaacagagcttgccaagttccagcttctgatccccctttccccactgcatagtctcaaccccagttccctccacaggactttcctcttgcccaggctcctcccccagccctgactggcggctctgtccaacccacctggcctctctcagccctagagcctgtgctagctgagctgtggctaaaggcttggggcctcctgaggctgcctgtgctctgctctgttgtttcgttgccacagctctgcaagatgctaggcatccttgaggcgtgcctgagtttgggatcctctgtcctggtttcctgtgctgcagagcctcttgggtgtcctgttgctcctccctcagtgggtgggccaccgctaatgtggccactggggtttgtccactgacacccccctactgcagaagacacactccaggctctgttcactgcagtctatgtggatggcatcccctggggtggtgcaggtcacagccctgatagctcctaatagtttataaaaggctcagtctcccaagtcaccttgtgagatgtgatcgacagtgatttgaagaaaggtggaacatcttgcccaagtcgcaggactagtgagtgttggaaccaagatcggaaccttccttccatggcacccactgcttcctatttcactggcccttggggtctaagatgggcctctccatggacttcggggaggcagaaccaaggcttttgaatccactgccagaggcagatgggaagaaatccttttggaggagcggattggaaggaaagcagtcccctccctttgctgactaatgaagggtgaacttgctccttgggaggcgatgggtgagtgctcttgtcattagctccagcaaagaaagggacggtgtgtttagggtggggtgggagaccaaagagtgcatttcctccagctacttcttggcaccactgtggaaagtcatttttccagcatgggggaatttgttttgaaagtgaaatgactctgatgtcatctgggcttgaaggagctaagccatctagaaacatttggagataggtttgccttgttttcacccacatttaacttcacagtagctgaggcagcctgaactttacagaagtgccctgtcagcagaaagagcctgtgcagtggcagtcagccacaaggcactttgcacaaattacaagtgctgggaaacaaaggccagcccccaatgcagaagtgggctccccagttctgtttacattggtggataccctggtttgaataatctgtgagaatctcagacctatagatcaagggtttcaaaatcagctaattaaaacagattgtgaggctgccaatttgtcttttcttttaagacaaggtctcactctgttgcccaggctggagttcagtggttcagtcacatagctcactgcagcctagaacttctgggctcaagtggtcctcccacgtcagcctcccaaagtgctgggattacaggcgtgagccaccatgcctaaactgccagtagttttttgagttaagttttgaactctcaggttggatggatggaagggcagagggagagagagagagcaagagaaaaagaaaggcagcagtgcattttttttttccactctggcagcccagtgttctcaggagcccctgcacctctctaggcatttatcatacaagtgtggtctaggcatttgccctgcctggctagagaggcccaaatgggaaccagtaactccctcaggctttggtggaggcaagttttgttgtggagccacaccccatgatacagcaaagcattatgggagcaagtatatgggtgacacccatctgctgtcctgattaggtctcccagctgccccgactaggtctcccagctgccccaggatatcctcctcctgcttgctgaagctgcaccgtgcagtggaaagagcatggcctttcacgtctgacagtctgagtctgtacttgctggctatgtgatttaaggacatttcttaatatctctgagccctccttttgtcaatggtaatgagggaataactccggctcagtaggctcttggaggattgaacaaggtaccactatatggtgtcttagttctgtggctggcacagaggagagtctcagaaaatatcagtctacctttcctccctctctcctttctccttgtcctcactgcccctcctcttcctcctgcccatgtcctcctcactctgctcctcctccatcttgacccacgaggctctttcaggatggattgcctggaaatctgtcatgctcaccttcctgtaccctctgctgtctgggatggagagatctgagctgagagataacaggctattactgaacagactgctgcatggtgttaccaaagacagccaagttgtaaattcctctgactttggctttttggatgctccaaaaataaatgtgggggcatttcagtctccagcagactggggtgctccagcagatgtggagtctctgggctgaggtgacagaggggcagcaggcatgtctgtctaggtttgagggccatcagctgccttttctggagtctccatcctctttgcagaaaccatgtgtggcgcagtgggaagcctggagaccaggtagatatatgcctttctccccaacactcaggtacctgctcctcagcaagggcactggctggctgatgcacccaattgtgattggggtcctgagggctcaaggcatattggtggtgtcagacacaagttggaagctgatggggtcttgctgcccacccatctaccccacacagggctggggaccaccatgacagatgctggtctggtgaaagtgctggggatggagaggcacaatggccaagtatataaagaatctcagtgtggctctgtcctgagcagccccttgaggtacagtccattgagaagagcatgatggagaaagctttgggggcattgggctatgtctgttcaccatgagacccactagtggctatgggcctggttagaagaatctgggcttggggatggggccaggaaggtatgagggctgcctcaaaatttctcagggtcaggtcagagccagcaggagagccaggtgagggtgagggcactgccctgggcacaggattctggctcagcaaacagcagaagtgattcaagcagtgcaggtggtggagctgaggctgctgaccctagcaggtggcctcaggccagccggcttggacataaaggggtggtagtgggcttgaagctgtgagttctggaaaggtggtgagggagagatggagaagagccagctgtgtcctggctggaggaaacacagttcagaggctgaaatcattgaggcactggcatcctctcttaggatgtctctcccagcagtgaggctttgtaggaggagggacttcagtacaacctttgtgtgctaattggacaaatatacttcagaaggaaggacattgaaggctattgatcccattctacttattggaccttccttagatggttctttgacggcagtgaccatggaggtcagaggccacactgctagcaattcaagtcccctataaagatcactgggagaacaaaagctgccatctctagttcagagttcctcccacgcggtgctgccaggacaggatgctgccaggtagaacagagaaggccatgtggacttctccgattctttactgtgttgaaacaatgcctgcgggagccacaacagctgtgtactgtgcccaggacacatgagcatgcaggcatgatcccttttatgtatgaccgctttcttggcccaccatttaactccctgcaaactatgccagtacttcttccagggtagttctgacaagacccaacactgctcagttactttatctactatggttttgttaattattgtatcattagtataaggaggggggcccttaatggatgaccgaggatgctgtctgtaggctcttgtctcatctggaccccatttttcactttgtcaaactccagctgtgtctttgggactcaccttactctgttgtcttaagaaaattaatgctctgaagcttcctagccccttatctctattgtgactttataaaccctaagtactaagacaagttttcctaaattcactagtttactctattgtcttcctactgacatagagtataggctatatccaaacataaattactagataaatatatttttagaaaccatctgctatggtttgagtgtcctctccaaaacgcatgttgaaatttaatttccattatgatggtgttaagaagtgagaccattaaaaggcgagtaggtcgtgagggctctgctctcatgaatggattaatgtcattgagggagtgggttcattattgagagtgagttgttaccgaagtgaggtaggccctctcgtgctctctcgtgctctcctgcccttgtgccttccgccttctgctatgagatgatgtggcaagaaagccctcagcagatgtgggcccctcaaccttggacttcccagcctccagaagtgtaaggaataaatctctgtttttttaataaattacccagtctcgagcattccgttacagcaacatgagatggattaagagatcctctaaccaagtgtatttaacatacttcccattggacctaatacatttccttctgcagcatagtagatttctcttttgaacaataccaccccatgggagagtctgtggcttgtgaacagtgacccacagtcactctgaggctgggtgtttggtgtttgtatttcaccagttcctttgggcatagacttccttgcctctccaatctgtcaggatgtacagaagcaatgacctgtttcaaccaaatatccacagactctggaagtggctctggggctgggaccaggggctagggcctcatcccaatgtctggtgggccctagttcaggtctggaggtagacggacccagctggccactcagaggtgggctcagtttgcacatccatgaggataaagaggaactgcttctggaggtggggcaggctggaaagtgagtgtctagggtggcacagtcaagatgggcaggatggcagggagtgagagcagaattctggactgcagaattcacactgaggtggaagccaggagtggggatgaagaatggtggtccttgggggaggggatgtagggggctgttgttcaatgggtataaacctacagttgtatgagatgagtaagttccggggatcccctgcacagcatggtgcctgtagttaaaaacaggagattgtatatgtagaaatttgttcagagcgtagatctcatgtttagtgcacaaacatatgcacaaaaacatcaacaaaaacaaaggaacaaaggacattttgtttttacttgattttcctccagctttattagatataatggacaataaaaatatttaaggtgtacaacatggtgttttgatatgcattgtaaagtgatcaccagaatcaggctaatgaacatatcatcacctcatatagttaacatttttcttttttgtggtgaggaaacttaagaaattctctcttagtaaatttgaagtatacagtacattattattaactataatcttcgtgctgtgcattagatctttagaacttattcatcttgcaactaagtttgtaccttttggccaaaatctccccattcccccccacagcagctcctggcaaccacctttctatgctctgcttttttgagttctacttctttagatttccacatataagtgagattgtgcagtatttgtctttatatgtctggcttataacaaagcataacgttctctaggttcacccatgttattgcaaatggcaggatttaattcttttttaaggctgaattccattgtgtatgtataccacattttctttatccattcgctcattgatggccacttaggctgtttgcataccttggctattgtggattatgctgcaatggacatgggagtgcaatatttctttgagatacagatttcaattcctttgggtacatgtccagaagtgagattgctgaattatacggtagttctatttttagttttttatagaactgccaatacccaatactgttttccataatggctattaccaacttatattcttaccaacagtgtgcaaagcttccattttctccacatcttcaccaatacttgtcatcatctggggacacaaggtaatttttggaggtaatggatatgtttattacttgtactgtggtgagggcgacacaactgtttacacatgtccaaactaaccaaactatagatattgattatgtgcagtgttaggtataccaactgtatcgcaacaaaggtggatcagtacctcggacagcgccaggaagacacagttatcctaagctctggtaaggcagaactgtctggctctctggaacttttagctgttaggggaccttaggactctttaatgtcaacatggtcctcagggactttggatctctgtttctggaggacacctttgttttctagcctgggtgctggacctccttcttccccctctctctttttcccttcctcctttcttcactgctccgactgctggcctctggaagccagatcatggcaatcacaggagggagagattggagggaactgagcccagtataggaggccttcatcttgaagtccctttggtttctgagcccaggttaccacaggtttctacttggaaatttctagatagtttcccctgtctgtccctgggatttggaagtctccttgaatcagataagggagtgccaaatgtgactaggagctattttaaatcactgggaggaagctattggggaatgttacctgaacaaagagctttctccactggttttggctcaagagagccctgtataagccaccagagcccatgaatactcagtccttgtgagagccagagctgtagcaggggaccaactggggcctggggctccagcatgaggggctcccaagctaggtccctaagctcagaggaggactctttcttttaagatctggagaagaggctagtacccacttgtttgcccaaagccttgactaaagggttttgatggaacgatccctgaaggcttttcctcctctctgcatccacaggtcaggtggagtcatcttttccatggctgagagacagcaggaaaaagtgtttctaaatgtagtcagggtagatgttggggcactgatcacccccaagttatggtgggcggaattgggctggaacataggaatgtgcatttgtaaatgtcttgtatcaaggtcttcagaaagagaaggcttgtgtcttaactccttaagcctcaagttcctcaactataaaatggagacaatgttatagaatttttgtgaagattgtagacaaagtatagaaagtgctcaatgggaggctcagcccctcctttctccccagagggccagaggcattgtgtgatcctcctctctgaaatcccaggggagccatctgttctggccccaggggaagaccttattggaatccccagttcctgttgttcctgagagataatgctgccactcctcctattatggtggtggtggggggcaaaccgagaaatgtctgcatgcagaggccctcactcctccccactggctgctgcctccacagcctttggggcctcagatgtgatgttagacattctagtgcttcccaggcatgagggaccaaggagaaggcagtgaggtctgagaatcacatggttatgcagtaacaactctttcttttgggttttacacaatcctaaagccaagatcaatgcccagccatgtcacttcccatcagtttaagagaaatagagataggcttatgggacacgtctcagagcaggcacaggccctgcctctcagcacctgtcgtgtgctcctgaccaatgatgggaagttgagggagggcttcccccaagagatggaattagcttacatgagtgtaggctctggcaaagtgcgaaatctgcagagcaggctggagacctggggagagttgatgttgcagtcttgagtctgaagacagtctagggcagaattctttcttcctcaggggacatcagtttttttttttttttccttaagcccttcagctgataagacctacccacactatagaaggtaatctgctttactcagaatctactgattaaatgttaatcacatctgaaaaataccttcatagcaacctctagactcatgtttgacgaaataactggcccccatagcctagaaaaattggcccatgaaattaaccaccgcagacagggacaacgccacccagatgctttaaagtactgctctaacccagatgtagaccaagaggctcagggctgagaacacccacaccttgaccatggaaagcgtgtggctttgaagtttgccagcctgagttctaacccctgcttctctgacaaagacaagtttccttgtccctcttgaagccttcatttttccatctgtaaaatggagatcgtagctcatatcttacaggagtgttggagatcgacagagatgatggatatggcaggactgagcacagtgccaggccatgagtcataccttaccagtgtgttagcttcctcccagtttctctttctgcctttgggggcctctgtcagcagccctgaaatctgccatgccttctgtgctcaggatagtggacagaggcatagttctgtggggcttagcaggtgcctactgggtcctgctcagaggtccaggagcagaagtgttcttctgtggaaccccagcagcagagccaggggtgagcaagggtcaggattcacagggagctgagtgaggcagctgagggtgggacatgtggagcatgtgtccaggggcaggaagaggaggagtcccctctgccagatgtctttctcaacataagtatgttggggctcctgccttctctttgtcctggtgcatcttaaacacacagcttctgggcttcccaggagacatcacacagtgagccgaggggcagaatgcattttgaagcaggctattgaggaggcaggacaggtaggaggtgcagagaagtgcaatggagtgagctggggtaggcccttgggcccctcttgatgcctcctctgagtggggtaagagcagagagagtcactaccagggttgggggcttcacagcctgcaagagtctccagctggaggggaggaaatgatggagataggaaaaaccatggcaacgagaagtaatgaccaatgacctgagactaaaaagggaaaactggtgtgtctttaaaaggtcagaggcagtgaggtcaattaagcctggagataacatgtggaggcagatcttagagggtgtgcccagaaaagccccaggagagacaggaacggctcaggacgagccctgctggcgtctcctgctgacatctgagtgcccagaagagattcaggtgaggcttctcaaatagctccctgtgcaactgggtgagctgctggtggattggagagagcccagggctgtcagtgaaatcctgtccacaacccttaataactgtgtgatgtggggcaacgcgatgtccattaggtggctcagtttcctcatctgtaaaagggagctaatgagaccacctcatggaatggcaggaagatcaatgaggaaaataaatatctgcagctgtcatgcctcttagatagtgagtgctcgagagaggcatgctctccccttgcctgcttcttccctgtgcccctccttcctgctgagcacagtctctgtcatgtggggagagaacctgtgctgacatcctcctgggcagtgctccactctttgttcagaaaaactctaatgaagtaagaggttctttccttatatttctaatttttttaaaaatatttttgtacatacagagaagtatagactagtgtaatggacatagccatttacatctggatttaaacattgttaacatttgtcatatatctgcttcatctattttttgttgttgaaatatttcaaagtaaattacagacatcatggcattttacttctaaacacttaagtatgcatccctaaaaattggaggacattttcctacatttcatgcctagcagaataattctaatttcttaatatagtctaacacaatccatattcaaatttccctaattgcccccaaaatatctcttatacctgattggttccagctgggattcaatccaggacaacacatgtgattcattatttcacataaatctcttcctatttagacgagtgtttgtcagacttctgtgtgtgcacacagatcacctggagatcttgctaaaatgcagattctgcttctaggtccagggagggcctgagattctgcatttctaacaagctctcaattggcgctgctgctggtggttcaagaaatacaccttgagtaactaaggtctagaacaaccccctttctttcctatgacattgacttgtatagcatgggccagttgtcctgtagaatgtttcagctactgaatctagccaattgcttccttagggtgacatttaacctgttcctctgtcccctgtattgcctgcaagctggaagttgggtctggaggtgagtgtgatccagggaaggcatttgtggtaagcatacaggattgggggtgctgtgtgtttcaaatatcatcatatcaagaagcacatccacaaacctttcactgcgattcatggttgagcatccttggccatgcgaggttgtaggcagaggctctgtggatgtgagcatagaccttgtggggaggtggggagaggattcattggttgcatcaaattcccaaggaggtgttagaagttttcattcacaaaaagtaccccagagtgcttctcaaacctccgaggctcatcagtgctgcccctggttcccctttcttttcctctgctgggcgaggactactgcctcttgctgcagatgtgtctcccaagaaggcatggtggcccctgtggagtgagtctcaaggaggagctgctgttcatgtccaggatctgcctgccaggctgggccacatcctgcagagacctcacctggctgtgacctagaccatgtgccagggtgaggagggaagctaagggtcaaataaatggagctgtgtgagccaagtgaggcttttagcacagaagtaggtggcgggctgggagccagggaaggccagaagtagagtgagggccagtcaggtggcctgggagccaggcagcaaatcatggctgtgtctgagcccatttttgggggtgcaaatatagccttgatgacttaagagggtctttcaggtacaaaaccaatgaagacacctgaaatgtgtttgatctgttgaatcagaaagctgttatccgagggctgtgaacatctgctctttttaatagtactgaggccttaagaagggtaaagaaactgattgcagaaggggtccttggggtcctttatcagtgatgattgtccatcctgggaccaatggtgacaatggttcaggcaaacactgctcagaggcagagggctggatgcactggcttttggatgcactggctttctcattctcgggccttgggggtccctgctccccctttccttgggaaggtggggatacaaggttggaacagttccttgtggccaagggtccatctgctggatggtaggccccttgaaaatgggtctagatctgggtgagatgtgtgtctgctccccctttaaagagctggcagagatggagagaaaagcacatgtgtgcaggctcaggggaaagataatgctgtgtaattttatatcttattttatgctgtggcttagccacacaccattagcacaacaggaaggaaaatgaatggaaatgaagggtgtcagtggcaaagatagatagatggagctgattgatttttgatgtttcttcagtgcaacctgaagcagaaaatcgacaagccactctgagctagagtctgccagggcccccagcagcaggtccaaggtgaggtacctctcagctggtctgtggcctgtggcttggtcctcgtggtgagccggcctcattgtctcttttctgctcccatgggctggtgggtggggggcacctgaaagctaagcacttattcctttagccttccttggatggcaggggaccctccagggcctgtgcattttggcctaaacatatggactagcaatagagagggttcagcaacttctccaagaccgcctagctggtaaatggtggagatggaatttgaacccagtctttctgcttccaaagctcccactctctgcccttcccattccccaggatgctgtagctctgtcttctcttctgtcttttcttcctagcccaggcttcccggactgcaccctggactctaggtgcattctccaggtgggagtgggaagtggctggctgcatcagggtggagcggactggagcccggggaaatgctgtgcttggagtcccaggccaagctcaggagggttctttcctcctgctccagttaccatagcttcattcataagtgttggatagctcaggtggacctagaagaagctggtctttgccattcccaggccaggatcagcctgggagggtggaggctgcagggaactctatttaaggaaaagctctttccaggtattttgttttttccctcccctcccggcggcccagcccccatgcccccaaccgccccgtgccactctcctaactgcagttggcttaatctttctaaaatatggctctgatctccccagctcctgcttaccaagctctaatggctcctgtagggggcagccactcatccatcctgcccagcctcccaccccgattttcttttgcagagcctcctccctctactcctagtccatgacttctagtgagctggccagacgcagtggcagcccaccccaacgaaacagagtgtcctactcaccccagttggttcagggatgggcagccaccccagctgggccaatactatatccttaaagcnnnnnnnnnnnnnnnnnnnncctgtgcattttggcctaaacatatggactagcaatagagagggttcagcaacttctccaagaccgcctagctggtaaatggtggagatggaatttgaacccagtctttctgcttccaaagctcccactctctgcccttcccattccccaggatgctgtagctctgtcttctcttctgtcttttcttcctagcccaggcttcccggactgcaccctggactctaggtgcattctccaggtgggagtgggaagtggctggctgcatcagggtggagcggactggagcccggggaaatgctgtgcttggagtcccaggccaagctcaggcagggttctttcctcctgctccagttaccatagcttcattcataagtgttggatagctcaggtggacctagaagaagctggtctttgccattcccaggccaggatcagcctgggagggtggaggctgcagggacgtgtagtgtaagtgctataggctctttgccaggtggttttgtctttctccctcgccctcgctgctccttccgctcccctgcccttcccctcccttcccctcccctgtctttcctccctccctccctcccttcctccctcccctgttccctctggctctgtcacccaggttggagtaaagtggtacaatcatagctgatggcagtcccaaacttctgggctcaagcgatcctcctgcttcagccttctgagtagctgggaccaccagcttgcgccatcgagcccactgttttagttttctagggctaccatatcaaatttccacaaactggatggcttacaacaacagaaatgtattcttctcccagtttgggaggaattctttcttgcctcttgtagcttctgtggcttctggtgtgccgtagctttctttggcttgtagatgcatcccccattttctgccaccatcctcaaatgggcttcttctctctgcaatgtctctgtgtgttctctcctcttcatatgaggacaccaggtgttggatgtaaggccctccctaatctaatatgacctcatctcaactaatgacatctgcaaacacactatttctatataaggtcatattctgaggttggggtggatgtgactttttggagaacactatttagccaagtacatattccactgggccaggtccaggcaggggattggaaaggcctcatggagattgtcagcagtgccgaatttcagtgtccccaagactaactccagcacgtgggtctgtcccatttgcagtttggtggcccaagtgtcagtgggaaccagggtctttggggtagggagtgtggttcatgggcccttgactctgcttggtgttggagggacaggcacaagccctggattttctgctggctttctgctaagccctcacaatccacattggcaaagcgctattgaaatcttattgcccacttcctgtgtccaagtgttgtcattgttcaattccctcctatgagtgagaacatgtggtgtttggatttttgtccttgcgatagtttgctgagaatgatggtttccaggaaggggaacttcacacaccagggcctgttgtggggaggggggcgaggggggagggatagcattaggagatatacctaatgtaaatgacgagttaatgggtgcagcacaccaacatggcacatgtatacatatgtaacaaacctgcacattgtgcacatgtaccctagaagttaaagtataatgataaaaaaaaaaaagaaatagagaacaggacatggttaccagaggccaggaaagaagggagaatggggagatgctggtcaaaggatataaagtttatgttatgtaggatgaataaatgtagacatttattatacaaaaaaaaaaaaaaaagaaatcttattgcccacatggaaagctagttgttgtcctgcagtaccacatggaacaggcaggcaggattggttgtatgtgacgttacctctctgagcttgtgagggcatctataaagtagaggtgatgatagctccccttatagggccgggtgggggtggaatggaataggacatggaactacccccagtgcctcagatatgtgagctcctttcctctgcagctagcccgggagcttctggaagacgggatgctgtccactccttcctcacgtgccacccaggcttggcataaaattgcaggccagggatccgtgagtggtgaacaaaccattaccaatgtcagccttataccaggccagagctcagcaccgggcctccagacacaaactggatagaaccactgccctcaaggaaaccccaggctgggagcagggcacaggacactctggcaactctgtgtctgggagagttgcaggtgccgtaggggtggagtgggattgagaaacagagagggaggtgaggaagcctcgggggcgtgtttagctccaggatgagtcctgaaggaggggcctttccagggaggtggggagggcgtttcagccaccccaggagaagcacagtagaagcctgggtctccaggcctgggtgagtcctcacaagaacggccagggctgcccatagccccacacccccagcacaggggttctggagtgcagggagtgaacgtcaggtgaggctgaccttatagctaaagagactcctttgtctgagtttttatgtaatacacaaaaatgctattacattagaatggaaataatagagccagactccatggttctattttcatcttctatattcccttccagtccttggtccatagacatatttttaattatggcacaactacagctttggttgcaacttcctttattatactgtaaacatttttcactgttgctacagttttcataattatcatttcaatggttgcataaattggccattaaattgatgttctttaatttatttaaacatcaccttttgttagaggtttagattgttttctgtttctggttattataaatcatgttgaacatctttttgaagcagtcatttctttctaacgaattattttctcagaagaagattattgggtcaaagagtgtgggcatttttatggtacttgcaatggtaacgccaaattgctttcgaaaagatcatttcctgtcagtgtgcaagaagattggttttaccacaactcaacaagcatttgatgtggcaattaagcctttgtttttcattttctgctatttaatagatgtgaagtgacctcccattggattcccagagaggtggattttcctgtgtttgctaacagcaccttcccatgggtggactttctgtccagcccattcatctgctggcctctgggagttttgttttttataacggtttgtgtgaactccttatattatagttatcaacgctgcctgacacactgctacaaatgtgtttcatagactatttttaattttagttatcttgtttctttcctacaaagcttttgtactttttatattgttgaattatctttttatttatactttcttttatcagtatgaaacttgagaaattatcactccctccaaggaatagataaatttttccttctatttcctgctaggtttctttcatttgacttctctagttgactccttaatctctccaccgtttattttctgatgtgtgaggaaaggtgtgtttctgaactaattacttttcctcaaaactatcagcgcaatttattaatcaagaattcctttccccatggcttgttgatacctgctttgtaatgcattaaattcttgtatgcaattaggtctatttctagatttttaaattctgatccatatttctatttttgtgcaagttctacagtactttgttattgctttctaataatttttatatctagtttcctctcatttcttttcatttattgaattttatttatttttctcatctattttcaaaatgattttagaataactttatataattccttggagaaatccttttgagattttgattgagattgaattaaatgtataagttaacttttgggaaagtaacatctttataacataaagtcccatctgggaacagttattttctctatttattcaagccatctttatagctctaaataaagtttggtagttttctttacacgggtcatgcacatctctagtgaagtttatttctaaatagttatactctttgttgcttctgtgaatgagatcttcttgttcatttctaaaagtatttttgcctgtgtagaatacagtagaataatcatttttatgtatgtatgtatgtatgtatgtatgtatgtatgtatgtatgtgtgtatgtatgcatgtatgtatgtatgtatttatatatttatttttgagatggagtctccctctgttgcccaggctggagtgcaatggtgcaatcttgattcgctgcaacatctgtctctcgggttcgagcgattcttctgcctcagcctcccaagcagctgagattacaggcacatgccaccatgcccagctaatttttgtatttttagtagagacggggtttcactatgttggccaggctggtcttgaactcgtgatctcaagtgatctgcctgcctcaggctcccaaagtgctaggattaaaggtgtgtccagcctatttttttaaaatcatacttttaatttattgtataaccaagatggcaacagcattgcagaatttaaaaagaaaacaaaggaggaaccaccatctcaccaccttaacaagcaaatggttttaatttttctgtggttctttctagaacttgtcctcaaacagacagacattgggcacagctataaccacagtgatgatctgttttgcctccagtggcttcttctataataccatagcattttccttcttgtcacagaattttgctaatggtttcacttaacggtgagccactgggactgagtgttggttctcagatgccctgaagagtgtatggggacattggagatgggctgtggctgccagccatggtgtgggagccactgtagttaactcagggctggtggggccagtgctatggggaaactggccacttcccagtagcactagctagggccgagctgagctaagcccctcaaacctctctggcaacaggaggagcaagaaggtagggacactgtctgtaggggggatggatgaggtgtttgagtcagctgaggaactgcccctccacagtgcaggtgagcaggtgctttctagatcttgttggtgctggtgccaggtgggcgaagtttacccatcattggtgtcttcctcctggtccttttgtctctcacatacctgttgagtgtccgtagaatgtcgttagatgctggggatatggatgaccaagccaagctcaggtatgaactgcagtagcactgggcaaaaccccaacctgcagctaagggtggaaaaaaaaagaacacccacgtgaccagttttggccgtcatatcgcgtttctccgggccattctttctccactccgtctgaccttcccctctctttccgcatctgcaacacctcctctctcctccatgctggccacagccccgagcagcagagttttgttccctatatagttcactgaggagagagaaggtggcagtggatggcgatgctccatccccacacctgcctgcctacccacccgtgtcctggacaacgctcgggctcactgctgacctgcccatgtcctgtctgagacgccctttccttgggcactacatcccatccgtccgcctcctttgctccaggccatcacccagcagttctctccctcctctccttcatcatcaagtttccttctctagtggattatttccatctgctcataaggacactgtgttatctcctgccctaaagattcctgcgcttggtccacttcctctgcagctactgtcctctgcgtctcctctgccgctcccccacccacttacagcgaagctcttgaaaaggccgttctgtatgctctgtctcccatgcctttctctccattgctcctgtgcgcactgtggtcaggcatttgccctcacgactctcagagctgctccaatgagcattctcatgacttatgtgtagcttggtccagtggcccaatctcagtcctttccttacctgtcccgcccccactgttccccgggctcaggactgcagcctccctcctcctggctctgtggcgggtgcaccttcctagtcccattgctgggctcttctcatctcccgacctcaaaacactggcatgtcccatgtccccaactttaatcatctgtcttctgttgtactccttttcttgatgacttctgaccgtctcacacctttgaatatcacctacccatggaggactttgcagtcctgccagcttgcctctctcgttagctctggattctctgtccactgcttctccactgggatgacataggcttcttacacaagcatgtccccaagctgggtgcttcagcccacaccagcccccgtgaggcttctccatctgccctccctccagtgctcaggtccagtgccttggggtcccctgcactctcccctcttcccatccccaggagcccacccttctagctcagcccactgaccacccccatggctaagccaccatcgtctctcccctggattcttggaatggcttcctgacaggtctccctgcctccgccctgtcccacttggtctgttctcatcatggcaccagaaagatgctggtgcacacagctcactcagatcaaagctcccaacagctcccatctcgctagaggaaaagtcagggtccacacaggagtcgccaggccttgtgctgcccatctgctcccccaggcctcagggctcactgccctgggccaccttatgctgttctccttgccttcaccagaaccggtatacctctcttagagactcaaccccagagcttgccccaggactccgtgaagcctctaccctcactttctggtgctgaccaggcctgcctagcctcctctccatactcctccagcttctacactaggctctcctgatcctctgcctcgatttagttttacccataacagtgatcacccgcgaatatactctatcatccactcagccatatttttgaattgacttaaaatgttttatttgactttattgcaataaatttttatttattatcttattgttattttttatccatcagccatttttaattttactagagccttagctccaagaatacagacatccttgtctggtgcaaatgcacccagcacagtgcctggaccagagacagcactgacgacgtttgtgggaggaatgagtggtgaatgaatgaatgaatgaatgaatgaatgcattccaccccagctgcagtgtctcctcccccacccctccctatcgtttgagtctgtgtctctgtgctgacaggttggtgtggatgcaggttccctgatgctgcagccctgaatccagggcctggtgctggaagcagcaggttgctttgtggggaatacaaaagggtctttgctctgaggattggtttggggtttttgtttgaaatgtaatatgcagaataataacaaaaaaagtctttaacatgtaaatggctctgcttggcagagccaagtaatcaaatcaaatggctcttcttctatgcctaccccatccccaaggcattgctggcgctaggaagttcctctggggctttgatagtcagcttgtgggggtagctgcaggggcctgagcagtgtgggggcccttctcctcaagtctcagtgactggcacgcctgggccagggaaagacatggggaggtaggcgatggctccttctccctccctggcattggagtgtgtagccccccagccatggcagccctgcatgggccacagggaaagaaagaaggagtgataacaaagctgggaaaggttggagctcgaggaagaccctgggcttcttgagaccctcccacaataacctgcaatggcacatgggttgggcagaggcagcgccggcacagctagggcacaggacacagctctgggctgggcatggtgccaggctcaggagtgagagactgggtctgcagcagggcctctgggagtctgaggtctgtgattttcgtagagtccaggcccagttggctttcttttcacaagggcccatccatctgcccccatccatctcttcacacagacaccctcactcacacccacactcacagagctacattccacactcacatctgccacactcacacactcatacatatacagtcccacacaaactcacgttaacatccacactcacacccacacttgcatacacacacccacagacaccgtcacactcacacccactcccgacactcacacctgcccacactcgcacccacccacccacatccacactcacactcacccacacttgcacacacagccacactcctcacattcacatgcacacacggaaatgccttggccctgaagagagggaggaaggcaggggtgaagggaggtacagggggacccctccccagcctcagggcagcagattgctgtttgctccatgggaccagaggaggtgccaggggcgacgcttatctgtgagctcaactccagtttaccaacaattgctgtaggagctgctcttcctgagaactgagactttcttcccggcatggtgatgcttccctagggcatgtggctgcagggcaaaaggggaatccattttcccaacagggaaatgtcaccctgtgcatcttggctgctgtcagtcctgacaatctcctgaaatgaagcttgcaggtgagcaaagaagagcttcctgcagctctgaggcctgcggatgtgccatccttcccaaagcaggaagcagggctggaggcagagcctagaggtggcgcccttgtggcttctccccttggtcaggttcccctgagtctgtgctggggcgtgcgtgctttttcttgcacaagcctgcagcctctgtcgtgggcctgacctggagggtgtctgtggaggggcttccctgaccctgtgtgtgggccccagtgcctcctctgctcaggtttccagggctggcagccccagactccaggtgatgatgacagtgaaggagaggaataggccctggcttgagaatcagactggcctgggtttgagtccttctcaaagggccctggctgggtaacttgcccttgatttcctctgtcaggtgggcatgataacccctcgatcagggccgcatgttgaattgctgccacctgcccccgccccagaccttgctgtgctgtgtccgtgtgtcatgggctcagggcatggtgctagcattgatggaatggtcacttcgcatcagccttggagatgagctgatgtggtactcattcccacggagctctctgtttggtgggggaaccaacacagaaacagagacttagcgctgtgtgatcttgcaccagctgagatgaacagagagagtggtgttggggacagcagcccagggcagcccaacattcaggagaaggtgtctggagggcttcctggaggtggatggcctgtgctgaagcccaaaggctgagtgagagtcttgtgctgtgcccctgggctgaggcagggctggtactggcgaggctgctgtggggtgagcctggtactgcccggggttggggagtccctctcactcagcctgtgccttccctgggagtgactcatttctgctttccctgggctcctcagcttcccttcctctagcctggtcctaacatggtctctgggccaaagtctagggccaggctagggcgaggagtcagtggggatggaggtcaatggggatggaaagtgggggtctcatccccttcctgcctcttgttgtgtgctctgtgcaccgcgctgtggatctggaggccctctgggctctgctttccaccccccgccacaggtccccttctctgctttgtccctgggccttgtgcctgtggcccatggtggccacactctctgggggctcagagctgctgggagcagagcagcgcagacttccaggatcttcacaagctgtcctggtcctgggaagctcttgggacctggagctttgctgctcctccctttgagcctttcagggactgggacctggactgtcagaatctcactgctgccctgggccgcttcctctccaggacagctctctgtcctgggtttcaggggtgcattgtggcctgaggaggtgttctctcttgctggtctattaaacaaagcctaggttcattaacagtgggaaaagaccctcacctcatgatccaagctgactcattcttggctttccacaactgcctcttgccttattgttcatactacttcctatttctcccaaacatatcatggtctttcatgctttatctttgtggctctcttacctggaacatattttattttattttattttattttatttttgagacagagtcttgctctgttgcccaggctggagtgcagtgtcatgatcttggctcactgaaacctctgcctcctgggtttaagcaattttcctgcctcagcctcctgagtaggtgggaatataggtgtgcacaaccacacttggctaatttttttatttttatttttagtagagatggagttttgctatgttggccaggctatcctcgaactcctggcctcaaatgatctgcctccttggcctcccaaagtgctggaattacaggtatgagccaccgcacctggccgggaacatcttttaaatgatggctttgatgtgtcctccccaggagcaccccaacgctctcagccagaatgaggcactgcctcttcagtgctcacaagagcaatttgcagttcctcttagttttattaggctccatgttttaggaaaattattcatttatctataattgagtccacttatttttgcaggcatgaggagatgtattaatcaggactgtttgttgaaagtgataaaaataccagttaaacttgtttaagtaaaaaagggaattcgttttagcttatatgacaaagtggtccaaggatgggctagcttcaggcatggctggatctagcggttacgcctcctgctcttgctttctctttcttgctccctcgcggtgtcttgtttctcttcttctctcattggcttgactcttaggaatgtccttcccacccaatgacaaagaggaaccaccacaactccagcttgtctggtctttggtgtccacagtctcagcacaagtaagagtccctgtttggaaagctcaggcaaaggctttaaggatatagtattggcccagctggggtggctgcccatccctgaaccaactggggtgagtaggacactctgtttcgttggggtgggctgccactgcgtctggccagctcactagaagtcatggactaggagtagagggaggaggctctgcaaaagaaaatcggggtgggaggctgggcaggatggatgagtggctgccccctacaggagccattagagcttggtaagcaggagctggggagatcagagccatattttagaaagattaagccaactgcagttaggagagtggcacggggcggttgggggcatgggggctgggccaccgagaggcagcatcctgggttccctggaagcagaggtggaagaggctgaggtagcagagcttggcttggcctgtgctgaatcaccaagggcagccgaggggtctgaaggggtgatgactgcttcagctggccgacgttctgtttctcagggattcacaattaggataatgacatgagggatgaccttgccagcagtggtctccaggcccttcccctcttcctcactcagtttcatgcttcttggagccctctgtttttcatggctggggctgatgttcctgggcattaattggtcttcattagacagtttgagagttgaggatgctttgggcctcactgtgtctctcccaaccagcactgggggtccattggtctgccaaccttgagtgacagggatcttctgagtccatctttcaagtgtgtagctctagtgactgtgctcttggggcccagtgggagaagaggcatgggaggcagaacagtggtgtctacacatatttttgttcacatagaagcctggacagacatggtggggtgagctgtgtccagggccatgtcctattgctgagcaggaggccactaagtgctggggagtggtggggcctctgttctcctgcagccttcaccccatgcttgtgtggggtgtcttggtgcctgcgctgcctgctgtgttcatgaggctggcatagccagtcggccctgctcatagaagcgctctggccgtctctgcacactgaagaagaggtgacggccacccactgtcagattgacattatctggcaatttgagtgctgccgctttgaggtttggggtgataatggtgatgtttgagagggaacccagagacccaggtgctgctttgaggaggctccaacataactaagctacttttcccccagaacgcaaccgagaggcaagcacggctgttcagcaggactcctgggttctcacagagttccaccttgtttctggtttctgagtcaactgaagaccaagttactgaagtggatgttgaccacattctagaatagcagtgtggttgcttcataaaagccttacttgtaggcatattaagctgaatgaacattgccagagagaaccccctccctcaaaactgtaactgatcacacactgtccaaacagcaggtgccgttattgtctctggagactggagactgtgggctctcccaggctccctggggatgttcttggtcagccatgcctgaacgctccagctgaggagttactgttcaggagacatgagggactcttggtgttcgctgctgaactctgctctcgcaggtgaacaggtttgtggccagtgagatcctgacttgtggggaatgtggcaggtgggcagatgtgagtctctgccctcactttgtgcccatagactcagcttctgccgggcagcctggcatcttcctgctgccttttccccaggaggcaatggtacaactctgcaacaagcatctttggtggaggcagagcatggcaggggctgggcaggcttgaagggtggtgctaggcctgcatggagcatgtggagctggaggaagagacccttattggctaaggagcaatttcctggagtcttgtgggtacatcctctagtgatcctgatgccagccaccttctgccatcctagatatgagtgtctaggaaaccacagaaaatctctggcaacaggaattttgggctgaaaccatgtggctcagaagttaggctgaccaccgagaaaccatttaaactgggaaactttttaaagtgaaattaataatttcactaaagaacaggtgcaacggctgtgctgggcaaacgaggatacgcggtcacctgttcagggaaggctctgtggaggggcacaaccagccctctcctgtggactctgatggttgtggtcagggctggggctaggaagtaaggacccaacgtggcaggttggcctgagtattgagatgtcaggactggtcctggtgcacaagcccatttgatccagggtgccagtgcaagcactgtgcagtagttcattttcattttttttctctgttgcagaagacacttggtaaaacaatagcagcagctgcttttagttaagtggtgcgttactgggaccaggaatggtgcccagggctctcccctgattatctcttgctttgaggtaggcacccaacttttagttacgagagaattgagtcaatgacctgactcagaggaacttccagtccctcagggatacaggggggaatttggggactgcagttcaggcttctcatatgacaaggttgctttctgtctggtcctgtttctaccccagcctcacctgcagctccttccccacgggacctcctgtgcccaggcattccatctacttccgtgcctccagagctgtcctgtgcatccttctggacctcaccttctcagcctttagggtcctgctctgctgtgctcctcaagtccctacggcactgcctggagtcacgtgtctgcctccctgaccagcctataagagcatggctcataggagcaacaccaggtggccatgtctgtggcccaggatcttgcaggtgcccaggcagtggtggtcataccacagtgggctttctgctgggatgggtcttgagggccctgatttctgctcctctggttttctgcatgggtgctgacttcttcccactcacagtagatagctgtcaaccctgccggcgcccagagcggagagctgtcaggctctgcccctggggtaggtaccgttgttgtcccattttacagatgagaaagtgaggtgcagaaggcaggtaactccctcacggtcacatggcagggcaggactatgatgaaatcctgcctctatctgacctgattccaggatcttgacaatttgctgagccactgagaagtgtttcctatctgcctcgcgatgccacggagaagccatttgtggagcgcatcctgtactgcaaattcctgcctggcttctcgtggcctcactcgtgggaggacgcagggaattcgtggagcccatggtggttcccccaaacctagtaaaaaggcagggaagggaaagatgcccaagtgtggaatcttttgctgacgaaggagccatggagacggtctcatctccacccacggagacacaggctgctccctcaggcgtccttcctgggtcctcaataaaggcacagcactcaggtcagtgctgggttggtccaggctcaccgtcatgcttgtttcctcatctgtaaatatctgtccctttatagggttgtggtgaggaacaagatgatcctataactatacatctacacttctatatacctatgcacctatatctatgcctcatctatacctctctctacctatacctatacctacaggctacctctaacctctacttatacctacacctacagcctacatctaacgtatccctatccccatccctatccctatcccgacatctaatttaaatctatatctgtatctacatctcacctatacttataccaatttctagacctaaacccacatctacaataagttcttgcttaatgttgttgataagttattggaaactttaagcaaaacaatgtacagcaggttctcaaatacggttttgctcaaacgtcttttcattacaatgttgatgagaaaaaaatttggtttccattatacattgtttcacttaaagtcctatcagtgatgttaagtaaggacttaccatatatcgaatctatgccttgacctatttctactcctattcctattcctacatctaatctgtacctattcctagacctacagccatgccaacaccagcacctacagctgcgccctcatctccggtacatatctcagagcagtgtctggcatcctggaagccctgtgtgggcgtgctgacatatggttattattactgcaggccaggtggtgggcacagtgctggtctcttggaggtggcacagggttcctgtgttgttgacccagtcggcaggggccctgggctggggcatttaaacagcatgttgatgagaagctgcgccttttgtttctgtgacaggcggtggctggagtctccctggctgcatcctctttgtgggtcattaagaatgtcacatttggtttaggcaagcatgtcaccgcagggcttcaccatgagtgtcatgtgcagggcgatcctcagcatgccatccaggaagtccctgctagcagcctgagacagaggcgggagagggtgtctggcttcagagccatcgctgtcaactgatgttcacctggctcaggggaagcagggcctcataggctgtggagtctgacactactggtgctggtgtggtgtttgcagggacactctggatgctttccctgggctgaggaggggtagaggcaaaggtccctggccatggggggtgggttggggggctcgctcctctcctcttcttgactgcctcactgtggagggaggactgtccacctgtgggctggagaggcatggcatggtctcgttgtaccttccagcaaccccattactgttgtccccatggtttaggtcttgacatggaggctcgagaggtgacaaggctgtcctgaaccactctgcagaccagggtagagccagacctgagtggccacagcccaattttcttcccctataccacagtgcccactgcccactctgccatctccctctgctgcgaccctatgccccgtcctcagactctgacctgggattttggctcctgacagtggatggcattgtggccttccccacagcatccacgtttactgagggcgctctcttagcttttctgcctgccttgactgccatactgagagcctgtggcctggcgggcccacattcgctgctttggggtctgctctgagaggcctggctgtgtgatggagcacagcagctttgttggcccccacctgggagctggcagaagagctggttcaactccgcagtggtagggcagcccccagctcagcagtggtggaagtgggtgtgtcctgcgagctggtgctctggttttgttcacagaggagcatttgtagtctccacggcttggagatggaacctctcagttcctgtgtgcttcagtgaatcagagcctgattaggaggtggctgagctgctagaggagcctccatttgtaattgaaaatgcagcaatgaccagacaagggtgggctgtgtgtgtgtaggggtgaatgtgtgtgcaagtgtgtgtgatggcagatgtgttgtgtgcaggtgtgtgtgtgaaggcagactgaagacaggtgtatatatgcaggtgtgtgtatgagggcaggtgtgtatgtgtaggtatgtgtgtgagagcagatgtgtgtatgcaggtgtgtgcatgagggcaggtgtgtatatgcaggcgtatgagggcaggtgtgtaggtgctggtatgtgtgagggcaggtatgtatatgcaggtgtgtgtatgagggcaggtgtgtatatatgcaggtgtatgtgagggcaggtgtgtatgggctggtgtgtgtgagagggcaggtgtgtatatgcaggtgcatgtatgagggcagatgtgtatatgcagatgtgtgagggcaggtgtgtatatacaggtgtgtgagggcaggtgtgtatgtgcagatgtgtgtgagaggacaggtgtgtatatgcaggtttgtatgtgagggcagatgtgtatatacaggtgtgtgtattagggcagatgtgtgtatgcaggtgtgtgtgcaagggcagtgtgtatatggaggtgtgtgtatgagggcaggtgtgtatttgctgttgtgtgtgagggcagatgtgtatatacagatgtgtgtgtaagggcaggttgtatgtgcaggtgtgtgtgtgagggcagatatgtgtatgcaggtacacaccttatttgcatatgtgtatgcatgtgtaagggtaggtgtgtgtgtgcatgtgtgtgcatgtgtgtgtaagggcaggtgtgtgtgtgtgtgtcatgtgggcaagctacccagccacagctctttccaaccaagtgcctgatgccaggccctccttctctagcaggacagtttcactaaaatctgcttggtcctgctgaatccttccttccagccaggcagtgggctagatactggggcccctcaccacatgtggggagctgaatgaggtgaaaggcctgggtgctatcttgaggaggtctgagtcctcccttccccctccccaacctgtgcaaatagcacagaggaagggatagtgtgggggctgggcttttccagaggagagtctcctaaccctatgtggggaggaatctccagggaggactacctggaggagatggtgccaaagcagagccttggaggatgagctggaggagttggccaggcacacagcagggcagggagggcattccaggccatgagggcacatggacaggcagataggtgcctagggtagggggctggtgtcttagaggaagtgagagcagttcagaaggtgtaggggatggcaggggtaagggtgcactggtgggcagaggcctggccctgactgtgaagggtccttatgccaccggggagaggttagccttgactgtgagccaagtgggttgctgctgagtggcttcagagtgacatgtggcaagagtgacatggacagacatgactcttggagggtttctctgctgagggtggagaatgggttggaggcagggctggtgtggacatctaggagggagataatggctgaccttgggccatggcagtggggggctcagaggatgtgggaggggagcccccagggaagggccacaatccctgaatttagggggtgtctagtgatagaggccagcactctctgtaactccctgggaagagccctccgtgcccacccttgggtactgccatgcttaaatggtcttgctgctcatggtcgctctttacttacatgcaaacttgctccagtacagcccctttttttcctgggctgatgaggattcaagagcttgctggggaattgcactctttgaactgttccctgagatggaccacggatcccctgtgaggacaggctcagccggcacctggatccatggaagggctgtgctctgaaaactccctgcctctgatttccctggtggagtgaagaaaacaaaggctcggctcctgctgtggttttctgcattttacagatgaggcaactgaggcccagagaggtccaatgatttgcccaagtcacccagggagagagagggacacccaagcctcctgcctctacctttggaggctgggatgggagcaggagggcactgcttgaacatctgctgtatgctaggatttgcaggggcttcatgaattcactttcccatttcattcttccagtagccatgcaagctgagaatggtcttcccagtttgcagatgagcaaaccaaggttctaagtggtggaatcacttgtccaaggcgccactctgtgggatggggatgcaaacccagatgactggatgccagtgtctgtctgaacctaaccactgggctattgtgctttccactgaggagtatgggaaggagtggcatttaagcagaccttacagaaggcaggaggccccctccctgagcagtgctctacccccatcctagaacaactgtgggctggaggaaggagtccttcccaggccagggtctcaacctggctgcccagcagaatcatctgggggagcttttaaagtgtgctcaagctctgatcaattgaaattgcatttctggagatgggacatgggcatctacattttaaaaaacctccccagctgatcctgatgcccaatgaaggcctaggactactgtcctaggcctcaggccatgggtctgtgggcaacaggagcccagagcacctgcttcctttctgtaactgttgggcatggctctcctgaatttggaagatctcatgaacaacaaagttgcttttggccatagttccccatgctgattttcagatgaactccaaataagccaaggttaggcacaaccgcctgcccagtgggtaggagagaagggtagatgaggcagcagaaatgttacagttttcctctagcccaggacagctctggtgagaaattctccctgaagagccagcccaccttgctgtaccccataacccctctgcagccactggctgcaataggtgcagctctgctgtgcacctcaatctcctctgcaatcccagcagctcagcgtcaggcaggaagtaaatgaaagatgcctttccctcaccacaccatttcttgcctctctttatccaagtgttccatttccttcctttttccagatgaagccacttcctcccccctcttccaacacttaccaatggtttcttttgctgtgccaggccctgatggaggtgctttgggttgtatagatgagccagatgtaggctctgccccctccctattgcattctcagtcagtacaggaattagacaaggaacaagtcccaaagggaaaatgcccctggctccaggcaaggttcagaggaagggtgatccccatggttggtagaatcagggagcgcttcttagaaaagcaggtattttcagcctgtctgtaagggttgagaaggatttggatgtgagcagaaggaagagtaatcgaggctggagaatgagctataaaaggaaagaaggaggaagggaaaatgggggagagaaaatacatggatatgttatgcactgacaggggaaactatagaggaggtatggggagcagtgaatccagttagctggcagaaagggtcagtgaaaggaggttaggggaaagaacattggaaaagtaggtagggggccaggtcatggccttgaaagctgtgctgaagagtctgggcttgattccatagggaaaggcatgatgaaagcttttgtaaaataaatgaagggaggagaggtggaagccactcagcccctgctacaatgacttaggagggctttgctcctcctgctttcacaagggttctccataatgaatgtctccatgttaactattaaaactctctttgcaagtgataccattgctattctgaatctactggccatactgaggagcttgttgagtttggcattgactgtgctcctgaaatgaagaacaaggaatcattgaaggagcagcaagtagaggagggagaagatgaaggataagttgtcatggtggaaattttgtcagactagtccctaaatactctatttttgatgctattgtgaatcatatttttaaaattttaaatttgtaatatacaattgagttttatatattgatctttaattttatttgaatttatttttagagacagggtctagctctgttgcccaggctggagcacaatcatagctcactgtagccttgacctcctgggctcaagcaatcttcccatctcagcctcctgggtagctgcgagtaaagatgtgcaccactatgcctggctaatttttaaatttgtggaagagatgagatcttgttatgttgcccaggctggtctcaaactcctggcctcaagtgatctcttgtctgtcgctcccaaagcactgagattagaggcatgagctgctgcacccagcctgtatattaatatctagcaatgttgctaaacttacttattggttttagtgcctttttttaaagggtagattccatcaaattttctaagtaaatgataatgtcacctgtgaagaaagacagttttgctttttcccaatttggatgatttttatttcattttcttactttattgcaatggctggaaattcttgtaaaatgttagaagtgatgacagtgaacatccttttttctgatcttaggaggaaaccatcctattcagtctttcaacactaaatatgatgttagctgtaggtttttataaatgttctttatcaaatcaagaagttcctttctatgcctagtttgctgagaatttttattaggattgatttcggaatagtcaaatgcctttaccatgttcaatgagatgatcatatgtgtttctttttgggcttggtgatatggtgatttgattgcaaatgttaagttaaatgttaaatcttacttagtcatgatgtattatcatttttatatattgttggatttgatttgctaaagtttttgcatctaaattcatgagggatattggcaggttatcttcgtttataaggctgctataacaaagtactgtcaactggaagcttatcagtaacagaaattgatttcttacagttctggaggctggaggtctgagggggataccaatatggtccagcactgatgagggccctcttctgagttgtagactgctgacttcttgtggtacctttccatggtggaaagagggcaagagagctctctagggttccttttataaagaattcataacattcatgagagctccaccctcatgacccaatttccttccaaagatcccacctcctgataccatcacattaggggtagtacttcaacatgtgaattttgggggaacacaaacattcagtccattacacatgtggtttgttattattatttcttgtaacgtctttggttttgttatggtggtaattttgtcctaatagaacaaattgggaagtattcattcctttacagttttctggagaagctatgtagaattggtatcatttctttcttaaacatgtggtagaattcatcagtgaggccatcagggcctagagttttccatgttggatagttcttaacttcaaattccatttccttcatagataataaggctagtcaggttatctgtttcttcttgagtgagcattagtagtttgtgtctttcaaggaattggtccattctatctatgctgatgagtttattcttattcataatatgtccttattatctttttaatacctgtagtatctgtagtaatatcatctcttttatttctgatattggtaatttatgtctttttgttttatcttgatcagtgtggctagaggtttattaatactattgatctttgaagaaaagccagcttttggtttccttgattttcctattgtttttctgttttctattttatcatttttttgctttgatatttattatttcctttattctatttactttgggtttaatttggtcttcttaagacaaattcttaaagtagaaacccaggtcactggattgaccctttaaaatttatgtacaatgaaactttatctcttcttacagttttgacttacagtcaatttaaaaaatagtattatagccaccccacttcttttttgattatgatttgtctggaatatctttttccatcctttcacttttgagctacttatatctttggatgtaaaatgagtcatttaccttgaatcatgttttgtaaaatttattactccagcccctgtctttggttggagagtttaacccatttacatttaaagtagttattgataagaatatacttacttttgcaactttactatttatagtttaacacatttacatttaaagttattattgataagaatatacttactttggccattttactgtttatagtttaacccatttacatttaaaataattattgataagaatatacttacttctgccattttactatttatagtttaacccatttacatttaaagtaattattgataagaatatacttacttgtaccattttactatttgttttcagtatgtctgttaattacttttttgtccctcattttctctattaatggcttcttttgtgtttagttgattttttttggtagtgaaacactttgattcccttttaatttccttttgtgtatattccttggatattttctttgtggttaccctcaggattacacttaacatcctaaatttataacaatctaattagaactgataccaacttcaacagcatacacaactatgctcctatatagctttatttccttgtttatgttattatgacaaatcacatctttgtcaattatgtgccaattaaaatagatttataattaaaaatgcatgtgttttttaaattatgtaaaaaataaaagtagagttataaactaaaaattcaagaatggcttttatgtttgcccgtgtagttacctttgcatttattccttcatgcagctttgagttaatgtgtagtgtcctttcatttcaatctgaagggctccctttggcatttcttacagagaagatctagtggtaagaaatgcactcagcttttgtttatctaagcatatcttaatttctctttttaaaagttgtggtaaaatttatataacctaaactctacattttaaactatttttaagtgtattgttcagtggccttaagtacattcatattgctgtgcagccttcaccaccctccatcttgagaacattttaatcttcccaaactgaaactctgtacctgttaaacaataactctccattttcctctccccccggctcttggaaaccaccatcctactttctgtctctatgattttgatgactttaggtatcttagataagcagaatcatacaatatttgtccttggtgactggcttttttcatttaacacaatggctctctcttttgaaaaaggacagtattgctggatttagaactcttgagttttttagttttttttttccagcacttgaaatatgtcgtcccactgctttctgccttgatttctgatgacaaattggatgtcgaatcttattgatggctgggtgcggtggctcacgcctgtaatcccagcactttgggaggttgaggcaggtgggacacttgaggtcaggagtttgagaccagattggccaataaggtgaaaccccgtctctactaaaactacaaaaatttgctaggtgtggtggtgggcgccactctagaggctgaggcatgagaatcgcttgaacccaagaggcagaggttgcagtgagctaagattgtgccactgcgctccagcctgggtgacaaagtgagacccccatctccaaaaaaaaaaaaaaagtcgtattgagtatcaagtgttgaattgtgtctcaaaaaattcatatgttgaagtcctgacacacagtacttcagaatgtgaacttgtgaacttatttggagatagagtcattgctgatataattggttaagatgaattcattagggtgggccctaatccaatatgacttgcatccctatagaatgggaaaatttggtcactgagataaacatatatagagggaagattgtgtgaagagacatagggagaagatggcaatctataagccaaagagataggcttgtaacaaatccttctctcaaagtccttacaaggaaccagccttactgacacctccatttcagatttctatcttccagactgtgagacaaatcatttctattgctcaagccacccaatttgtggtattctgttatgacactcccagtaaaccaatgcattgggaatcccttgtacatgacaagttccttctttctttatgcctttaagattctttctttgtctttgtctttcagtagtttgattataaaggatctctgtatgggtctctgagtttatcttacttggagttcactaaactctttggattttaatttcatgtctttcatcaaatttgggaagtttttagccactatttcttcaaatattcttcttcccctttatctctctcttctccttctggaacactcataatgagtatgttagtctgcttgatggtatctcataggtcatttaggttctgttcacttttcatctttctcttttctttctgattctcagacttgataatttcagttgtcctatctttaagttcactgtcttctgtctgttcaaatctgctctttaaccccctaatgaatttttcattttgttattgtactttttagccccagaatttctgtttgcttcttttaaaaattaatgttaatctttttattgattttctcattttgtttatgtataatttccccaattttctttagttctttgtccatgtcttcctttaccactttcagcatatttaagacagttgttttaaagttgttatctagtaagtctgatgcctgggcttccttaggcatggtttgtgtaaatttactttgttcctttgaatgggccatgttttcttgtttctttgtgtccttttttaaaaaaggacttctgaatattataatgtgttaactctagaaaacatattgtcttccttccccagaggctgctgtttttttttagttgttgaagggtgtatacttctttgtttagtaactttctcaaagattgtattcattgtcttgtgtgatcactgaagtctctgatcctttagcctgtgtttggctaatgttttgacagataattccttgaatgccatgagctaaaaacaaaacaacaacaacaaacaaataagaaaaacaaaaataccccaaacatctctctcagtctttgcagatttctctgtgctagggaaatccttcaacacttagccaggctggcattgtgcctagagattagtgtgcctacaagacagggatgccctctctcaccactcctattcaacatagtgttggaagttctggccagggcaattaggcaggagaaggaaataaagggtattcaattaggaaaagaggaagtcaaattgtccctgtttgcagatgacatgattgtatatctaggaaaaccccattgtctcagcccaaaatctccttaagctgataagcaacttcagcaaagtctcaggatacaaaatcaatgtacaaaaatcacaagcattcttatacaccaatgacagacaaacagagagccaaatcatgagtgaactcccattcacaattgcttcaaagagaataaaatacctaggaatctaacttacaagggacgtgaaggacctcttcaaggagaactacaaaccactgctcaatgaaataaaagaggatacaaagaaatggaagaacattccatgctcatgggtaggaagaatcaatatcatgaaaatggccatactgcccaaggtaatttatagattcaatgccatctccatcaagctaccaatgactttcttcacagtattggaaaaaactagtttaaagttcatatggaaccaaaaaagagcccgccttgccaagtcaatcctaagccaaaagaacaaagctggaggcatcacgctatctgacttcaaactatactacaaggctacagtcaccaaaacagcatggtactggtaccaaaacagagatatagatctggaacagaacagagccctcagaaataatgccgcatatctacaactatcggatctttgacaaacctgagaaaaacaagcaatggggaaaggattccctatttaataaatggtgctgggaaaactggctagccatatgtagaaagctgaaactggatcccttccttacaccttatacaaaaattaattcaagatggattaaatacttaaacattagacctacaaccataaaaaccctagaagaaaacctaggcattaccattcaggacataggcatgggcaaggacttcatgtctaaaacaccaaaagcaatggcaacaaaagccaaaattgacaaatgggatctaattaaactaaagagcttctgcacagcaaaagaaactaccatgagagtgaacaggcaacctacagaatgggagaaaatttttgcaacctactcatctgacaaagggctaatatccagaatctacaatgaactcaaacaaatttacaagaaaaaacaaacaaccccatcaaaaagtgggcgaaggatatgaacagacacttctcaaaagaagacatttatgcagccaaaaaacacatgaaaaaatgctcaccatcactggccatcagagaaatgcaaatcaaaaccacaatgagatactacctcacaccagttagaatggcaatcattaaaaagtcaggaaacaacaggtgctggagaggatgtggagaaataggaacacttttacactgttggtgggactgtaaagtagttcaaccattatggaagtcagtgtggagattcctcagggatctagaactagaattaccatttgacccagccatcccattactgggtatatacccaaaggactataaatcatgctgctataaagacacatgcacacgtatgtttattgcggcactattcacaatagcaaagacttggaaccaacccaaatgtccaacaatgatagactggattaagaaaatgtggcacatatacaccatggaatactatgcagccataaaaaatgatgagttcatgtcctttgtagggacatggatgaaattggaaatcatcattctcagtaaactatcgcaagggcaaaaaaccaaacaccgcatgttctcactcataggtgggaattgaacaatgagaacacatggacagaggaaggggaacatcacactctggggactgttgtggggtggggggagtggggagggatagcattaggagatatacctaatgctaaatgttgagttaatgggtgtagcacaccagcatgtcacatgtatacatatgtagctaacctgcacattgtgcacatgtaccctaaaacttaaagtataataataataaaaaacaaaaacaaacaaacaaacaaacaaaaagagattagtgtgcctagagaaagcttagggtcttcttatttcttttcttagcatgcatcttgccctatgcctaatgtagctttctaaattcctcagtataaataggtacttttgagtgtaccactttcccaaagaatgttccaagctattcctcacaggtcttaggcagtctattgtatgtctcaactgtgtcttttgtcccaagtgtctttgagttgttagtttgctttgcaatgttgtgagtaatgcctgtcactttttggtctaagttccaagttagggggaacatagaagagtgtcttgtatcaatccttcaggtatccctcagacagcctataacagatagtcacaataatttgtgaataatatctgctctgctccctctagaactagagatgaaggtcttatattgggaacatgggatggcacttcaagatggtaccacttcaacataacatcatgctgggggagggatggggcatgggcaagtaaaaatgccacaataccttcctaaagttgcctttttcttgactaagtgttctcttggttgctgtaaacctttgactgttttccagagttttgacaaagttggctctggcagtttctgctttttttatttgttcattttttgaatgtttctgtaggaagattagaacttggagctgtctactctgccgttctcctccaccatcatttttgaaagattttttttcatggtataaaaatctaggttgatagtttttctctctttcaatactaaagatgtttctccattgtcttctatttgtattgtttctgataagaaatttactgtcatccttatccttgttcctctgaacataatatatttctctggctgcctttaagattttctctttatcttgattttgagcattttgattataatgtgtcttgatgtatttttcttcatgtttcttgtgcttatgatttcttaaaatttttgcatctgtgcatttatggtttttgtcaaatttgaaatttttcatgaattatttctataaatattttttctgtttcctcccactctcctcccctctgggactccagttacacatatgttagaccacttgaagttgtcccattgctcaccagtattactttctttcttcttttctcttttttgattatttttctgtctgtatttaactttggatagtttctttttccatgtatttaaatttgctaattttttcctgctgtatcaaatttgacattaatccaattcagtttattttttaaatctcacatattgtacttttcatctctagaagcttgatttgcatcttattttaaatcttccatgtctctacttaacgtttgaacatacggcatgtagttataatgactgttttaatatctttgtcttctaattccaacatctgtttcagttgtggtttgattttgatcgattgatttttttcttcacatgggtaaatttttttcctgcttctctacatacctaatcagttttgattggattccagacattgtgatggatatttttgcattcgtagaaatatccttgggctttattctggaatgcagttatgtggaaatagtctgatccttttgggtcttgtttttactattggctaggcaggacagagctactactactgaggcaggacctttctacatactctacccaatgtcctgtgaatcatgagggtttgaaaacagtcactgttcttgagagtaccagatactattccttcaaatcttttggatgattcttctcctggctttggggcgtttgctcacactctgctgaacacttgagtgggagtttctgaaagctcgccaggtgtctttctctgtgcccatcactcttctctggtactctgtcctgtgaactctggcagcctttgtctctagactctgagctccaaatctgcaactcaggacatctgctagactctgcctcctgtgtcaccttgggaagaaagacagctgaagaaattgtagggcttgccttgtttgatcttagcctctggaatcactgtccttcattgccttctctccaatgtcttgaaaaaccattgctccatatattttgctcatttttttattcggttattccatgaataaattctgattggcaaactagattcctcttactttagctgggttagaagcagaagtacaaattgtttttattattattattattttttgagacggagtctcgctctattgcccaggctggagtgcagtggcacaatctcggctcactgcaacctctgcctcctgggttcaagtagttctcctacgtcagcctcctgagtagctgggattacaggcacgcaccaccacacctggctaatttttgtgtttttgctagagacagggctgcaccatgttggccagggtggtttcgaactgctgacctcaagtgatccacccgccttggtctcccaaaatgctgggattacaggcatgagccactgcgcctggaccaattattattattttttaaatagttgtatctgagctcatttaatgatggagggaatggagagaatgaagggtgggggtggtagagaggaggcaattgttggagtgaggtggatagtgatttaatgatttaatctgctactgatcactgttctgtgccaggctgcagtgggtactgaatggaacaatgcatagcccctgccctcaaggaggccacagtctgaaggggtgagggaaagagtttatcattgttttaatcagaagattcggctgctcagacaaagcagatgttccatgtttccaaactattaagaattagattcatttaaaatgttttcattgaatgcaattataaacgctgttccaggaagacctacaaataaggatagatttgtttagtattaagggaaggggatgtttaattctgtgagggaggctgtagagaggagcttgggtcagaagactcatgtgtgagccctgtagaccccttccctacagggggtcttagtgcccgtagtacagtgaaatgggaccttgtattacaggcatctttcagggtttccatggagtacacctaggcaatggtcaataaatgtgggtcccatatcttagagggcttagagggacagcaaaaagcaaaaaagcaaacaggatgtgcccctacctccaagaagttgctgccaatctgcctcagaagtccagcttgggaattgagactaaaggggagtgaaagcagccctagatggggcctgaggaaagggccagctgtgaccagggaggatgagaggaaggactgagaaccaggagaggcaagaggccgaggccaagagaactcctaattagccaggggtcaatgtcagccagtgtgcagaggccgaggccaagagaactcctaattagcaggggtcaatgtcagccagtgtgcagagccagaaatggtgtctctcagaatgtgtgtgggtgaaggggcaagggagctgggtgcataacttggagtattggcctcagtgaggccacacagcaggagctggggcctctgtgtgccctgtgtgagtgagtgtcatcttagatacagcctatcctcagttacctggccgtgctggagcctgcccagtccagggcttgggactcaggccatttcattctgcccccacccctccaggcatcttggagctaatcaaaggttagccaccctgagcaatggaaaattctcaatgttctagacactttttatgtgatgtctgtgctcctgttattttaagaatgcactgggaggtaggttttgttgcacctactttaggataaggaaaccaaggttcacagaggtgaagggatttgtccaaggtcacagacgtgacttagcttggatttgaacccaagtctgctttccaaaccccaatctttcttttcatttttttttgagacagagtctcactctgtcacccgggctggagtgcagtggcgtgatctcagctcactgcaacctccgcctcacaggtcaagcaagcctcctgcctcagcctcccaagtagctgggactacaggcatgtgccaccacacccagctcatttttgtatttttagtagagatggggtttcaccatgttgaccaggctagtctcaaactcctgaccttaagtgatcagcccgccttggcatcccagagtgctgggattataggtgtgagccactgcgcccggctccaaaccccaatctttctaacatgcttcacgtgcctcttactttttcagatttcatcatgtggttatcatagggacatatctggcactaagcctatgtagaaagccagcaaatggtgttggtggcctcctattcgagtccctgacccttgtgctggcctggatgctgcaggaagcatggttctctcacgccttgcatgggttcaaatgggctagcccccgtggtaacaaacaacctccacacttcagtgactgattccttgctcaggctgcatgtccatcacggacggtcctgggctatgctccctgccatcctcttcctccaggaaacaggctgacaagcagccagtatccaaatgctgttggtgataccggtagagaggaaccgggaagctggaaccagcttggaaacatctgccgggaagaaatgcttatcacacggcttccattttattggccagagcaggtccctggcaggcctagctctgaggagttggggagcataccgggtagcagttaactatggataccctgaaagctcccatcagtggtgactttcagatgccccgtgtgtgtctttctgtgctgaaactggggctgcttggtggagaggggcccctccagaagcttactgtctagggaagggacagttataacccaggaaaggtttgcctccgggtaagatgactgtgcatgacacaggcgagcaccgggctgtgggtgcgcagagcagtgacacattcttcacagggagaactgcagaggcaacagtgtctgaacccccagtttgaagctaagaaatccctagtgaggtgcaagaatggaagggcctctgcagtttgagggacaaagtgtgaaaaggttcagggatgagagagcacagtgctgggtgcaggctagtggcctgtgtctctggagctctggggacctatggaagtgtgtgggcagaggaggaggctggagagctgggcagggccaggagtaaggctttcttcattgtgggtgggatgtcatgtcccttttgttgtctttcagctgagccatggccgtggagttctggctagtgggtgtggtgggcactcggaactgcctgcccagaaactccagcaagggccccgtccctgcatgcatctatccagcctgggtggctctaggctgcattcacaggtctagaccctgctgttcaccctggggggatgaatcagcttcattcttcctgaacaaaagctcctgggttgccagggagatgtaggggctgccgcctgtacttcctggagctgcagtttggtgtcaggaagagatgggcactcagcagccccagggcggggctgggttgagctgccatcaccgctgttgtccttgttgaatgggaccgtatgtggatcagagacagcagagcctctgagtttgcacagatttgggtttgaatgtggctctgcccattgatggctacatgactttcagctgcaagctgcccttttgaagcctgtttcctcaaattgaagttgggatgataatatccagcttgcaggggctgagatatttcatgaggtaacagttggaaggcattccatctattcatttatttaatacatgtttgtggctgtctgctgtgtgccaagcactttcccggggtgggaatccatgccgtgacgtgatgctgacgtggccctgtgctgagtggtcagcctggctggcaccatgctaggcacacagagagcctcactaaatggtatttactcttgttcttggggacagaggctctgtggggataggggaagagtcctccttggcttggtgtttgcctggtcttgggcattttggggaagtggaggggtagggggagtcccactacccaatcctatagcccggcaggaagtagtaggcctcatgagaaaactctggggacttaagctccatgctgcctgtgaatcccagggttcaggggaccaagagggtttcctaagcctgtgaaagctgctgcaattggtgtagaggccaccatggagccacagtccaggggcccagtgggccttttcttatctctcttgccaggccacagagtaggttctggagaattgggcctggcggctctgagctgggctgacactcatcactgacctgggatcatgggagttgggcaggagggccctcccctgggaaagaatcctctcatctgactgtggtgtgtaaaagatcaggaagcctcgaaccagattagggcagggctggggacaggtgcagagcctgggggctcctcagctgtgtagaagtgctgggaaggcatggtgtatttgggggtcagatgtggtagttttggggttattgatggaatttgggggtaggcagggatgccgtgtgtgaatgctctgggaggaggtttgcaggaattagagggatttgctggaggagctttctgatggcgtcactggtgctgtgcattgggggttggtggcaggtcctggagtcatagctggggtcataggtgtgttagggaggcagtgatgatgggttatcaggagggggaggatcactgatgaggtgggaggtgggagcagcgaggatggaatggtgctgttggccagggggtcctcagtgactaccccagcagggtggcttcaactgtgagctctggtgtgtctgtttcttgtctcagcgctccacggggaagtttagacctgagcctctgagaggggtcactgggcagagagacccctggatctcagagggctgaagggggaggtgaatggtgggcatgggtggcaaggggctgagccagggcagtggatgagtcaggagtatgggaggctgggctgctgatcagcgactttgcagatcctcagggtcattacttgctgttgttgctggggaaagttgcaaaatgaaaattaactgtcagagaagattgattcgtttgatgcctaaccaggagcagccttttattgctgtaaaatgttgatttcctcttgcctgcaatgacaggtgagtgttagtggcactgaaggaagacagatccctgaacagaacttgcagaaaccatcccctgaggggctcagccctcttccctccaacctctatggctgcaagagcaagaatgagtgtctgattttactcatggggtgagaacacatctgtgggtgtgccagccacgtggcagggctggtggtaagacctggggctctggattcagacacatctggattcaaatccacgctgggccacttaatagctctatgcctgtgggcaagcctcagtgtcctcatctgtaaaatagaagggtcatacctaattaagtcctagattttaaagcacttggcacagtgcctggcacaggttatcagggctgggtccagttgaaatgatcaaatgctgctgaaattcagaactcggatcacttttgcaatagcagccatcggtcgggggcaaggatgggacaaaggcaggacaagagtcaagagagggagccgtcagagaagtggagtgggaggtgaacgaggataatttgttataatggaaccatgcctgaggtgggggtatgggagctcatgcctatggggggccgggcagggtgggccactcagtctgcaggcctgggccaggctagctgctcagaaaggatgagtagcccaggtctgtccctgcccagtgtgtggccaggggagcctctccgtgcccatgccacttgtcttgcttaagtgtggctaggaaggaaaaggctgggcaagtgcagctcctgcttggctgatccaggccttgatggcagatagctatgttcagagagtttcctgggggccggggagtagcccttctcctctaggagcctcttgtcagcaaggagtgaatttggctgcaggttggagggcttcctcgtctgcagggccaaccaggaaggggcggcggtgacacagacgagcgtgtgggaggtctctgtgttgggcgtctgtctgcccgcatgcctgcctctctgttgctctgaaggaggcaggggctgggcctgcagctgcctgggcagagcggctcctgcgtgggacatggctcttctctctggttacagactcaccacttcgctcccaacctacctccacagtcagcgtggggcatcaggccaggccctcctgagccagagaagattgtggaaaccttgctctccaggtggagtggccagcctctgggaggtgttcaggaatgggctcctagagagtgtggtgagctcaggctggatctgagctgggcaaaactgcttccaaggggggcccacatccaagggactgagtggtggtgggattcctccctctggggtagtctccagcctatggggcaggggtacagggtacaaggggcagacagatgtagggaggacaggcaggaagttccagcaagtttccgggccaaggaaatgttgtagagaaccagaggatgataggaaagaacaaatgaaggacaaatgaaaaggcctggccaggctccagagtggggcgtgttgaagtctgagggtcatgggtctcacctgttggtggggctgggctcttagctccagcgtggggtggtactgcagctgctgggatgggagaggagggtgcccagcagtaccttctgtgggtcagcgtgactggcaatgaaaatgaggtgaatgaacatcccaggagctcatgctgccaataaaacacctgacccggcaggtgggcagcctggattcggctcccagctctgctgtgaacttgcagaggctcctggacaagtcccttcccctctctggctttctgtttgctcctctgcaaaatgtgagccaaatattttcaagcagtggcactctttgttcaaatgaaatattccatgaaacccacttttcttaacttagtgaagtgggttgaggtggggaaacccagtggtctagcccatctccaaagcctacttccaaacataaacaattgtcctagattttaaaaattaatattttaaaaccaactcttattgagcacttgatatgtaccaggcactgttctaagcactttataaatagtgactcaattctcacaacccgagggggagggaggtggggaaacaggcatcagaggtgaggtgacatctcaaggtcccacaactagtgagtggcacagcaggattccagcccaggcagtggggtctaggacggggtttggcctctgttctcgctgcctgtaggtgctggcgaagggggcggcttgttctgcaggtgaaaggccacggcgcccacgtgacttggtgctgcacgctggaaccccgaagtcagtgtctggggaaccgtcccgttgggcctggattctgacgagctgggagaggcgggatcctccccgctgccgtctcatttcccagctggcccaccgcggccccgccactccaaggccggtttacaatggcaacgttgcgcgccgtggcgcgaagggaattgaatgcgggagcttctccgccaggcacacactctaaccaccaaatttatttaagcagataaaatgcagggggtgtaatgtcagattaatggataaataaccgttctggtttttggcacgatgacggggagcagtagtgagaagcctcattatgtgcggctctgcctcgaagaacaagcctcgtgctgcaaccccagcacccgggcccgcgaacagagcattaaattgttggaaatggctccccttcactcgcagaacaaagatgttttctccagaataaattgactccctcccagcgcgctgagccctggtttcccacaaacgcagcctatgctctcgggggagggagggcgggcgatgccggcctgggaacgccgcgcagggagcttcctgcgggggcgggctcagggcttctggctcctgggctctctgtcgccaagcctccatggtaaaggagcaaacctttagttgtgtggacaacgcagaagtctggcagaatcggggttggaattagggtgcgctgagaggcagtgttccttggttagggctttgcgttttgtgtccctaggtttgcgtgtcgttggccagctgggcgatcttcaggcaagttatttaacctctctgagctcagtttgttaacagtgaagtggggaaggggcccttcctaacagggctgtggtccagagcacgtaataagagaacgcttgggggtggagccacgttcccttcctccagaaggcgccctccactcttggccctctgccagcatccatgcccaagatggtgtggtggggtgtggggacccaggaggctgctgtccggctgggcctagaccctgtggcatggaccagggggccgaactgaaggacgcaagctcttcgaggtgggtgggggaataaagcctcccttcctgggtgcccaaggtctggccagtgcctagtaagcccctggctgggtgggatcagaatctcagtggagagcttggctttgctctgggccaaacttaaagacagccattgcctccaggagccattgtgcttggtttctgcctggcttcctgggctcagtaggagcagagctccgagaggctgctgaggggcagactaactgctttcagatcagcgcctttcttcccctgcttcctcctccttctagaaggtgacttgcacagtgtaaagagcgcaggctttggggccagattcaccactgccacctcctggctgtgttacgctggacacactgcttcacctatccgagcctcagttttcacctgccgatgccagaataatgctttcactttgtgagactggcatgaagagtgaagctcctgggctgatgtctggcacacagctctttgggccccaatgtcctgtaacaaatgcttatggagcacatacttgtgccaggctctgagatacaatggtaagcaatgaagccttgtgtgacctccaggggttgactggggagcaggatgacctggatgctggtggctgcccggatgtgtatgtgtgtgtgtgccacctcaatgcccctgctcaggtgagagtgggtgacctggggttttgctgcatccagcaggatctggcctttgggatggtgggttgcctctgtcttgcgctgccttttccttgtccttttggccttgctccttcttacctgatccactcgagtttctcactgacctaaccaagaggttggaagaggaaaacgcccctggcttggggcaggaatatgggtcctagcggttagtggagcacctccttcccagtacattgggtgctctccaggtgagcaaagcagatgaggtctctgtccttgtggtgcttgcagtcttctgagtaatgacagctactgagcatttgcccagtgccaggctctgtgctaagtgcttttcacatccgatcctcactatgcaatggatagtctgtggccagctttgaatctcacccctttgccatgccggcaggtcctgggggccctttttctcccccaggggtcctgcaggccctgctagcatagagctctgggctcagataggggtagcttcaaatttggttctgtcctgttattttgcaagtcacataacttgtgtaagcctcagtttcctcatccataaaatcgagataatcatagtaccacctcccagggttgtggggaggaagcaccaagcatagaacctgggttgctacaggggccccagccctcatggctgggtgttttgctccctgtggagtgggcacagaggcttctccgggctttgcagcccacacccagctttttcttcggtttgaggaacgtgtgtttaggaggctaggagaaggctctccaggcagcactccttctcccacctgctgggtctttgtttagctccaaattaaagctaaagcagaaaatacaaaacatttcctccatcacaggtgaaggaaccggctgtcttatcagctctggagccgagtggcttggcatgtgtgtgctggtaattgtggagtctgaatgaaggggtgtctctggggaccatgctttccatcactgtccgtgtctgttatcatggttatctcattcccaatcaggctcaggggacgtggggctgggcgaggattttccattttctggaggctcacatcccacctctgccttcttactcattccgatggcccagctcttaacagccctccctggcctctgccttgagccttctaggatgtcatctgctactggtgtccattccagttgtgtctgtctgcatccctatgaggaccgggagctcctgaaggtcccattagagtccagggattattgatgaagctccaaccaggaagacagagtgggacacatggttggggtggtgggagcatagaagttcttagaggcagatctggcttgtaaatctagctttgtcacttgctgtgtgacctagggaaagttacctaacttctctgagcctggctttcctcatttctaaaatgaaggtgttactggtacgtgctgtttgtaaagattggtgtaagtattatcatgaagtaatatccacagtctgtagctgagtgcctgggatggaatcagtgctttccaatgctggcccaaaagtggaaggaagccacgtggttggtactcagatttccctgttgaaggtagaacagagaacaaggtgcaggagaggaatgctggttgttgccctgactactccacacaggtgttccatggggtgagggcaggctcactgttatctcaggaccagctagagaccagttcacactaaccaagctcagaagagactgatttttggctgaacacaagccagcgtattaattcacaaggagaaaccactgcctgggctctcatgtgcttccccagtgagaaatcctagtgagccaggtgactaggtgcttcccactgaatggaggaaccttcagagggactgctggtgggtctcagggacttcttgatcactatttggagcctgctatggaagaggtcagagtgtggcctctatctggcctcttcctctcagttcactttccttactggactctcttccctttgccttctgctgtctttccttccctgcccctgccatttgtgcagacttgcacacgcatgtgcgtgcacacacacacacacacacagacatgtgttattaggaatgcaactggactctgcacttgattgaatttgaaataattgacttcatttctgatttgaaacttacagattccccactcccctatgttggcagtacccaagtttttccttgacaatttgtatttttaaattaatatacttatacaacctcgtatgtaatgatatagatgtatttacataatttaatgatattctttaataattcagagacattcaactttctgtacgcattgtttacacgcacacaagggaggaaagtcattagttgtcatcagtgaacatggataggtacagattaaggagagaggagagagagagagaggtagagagagaggtaaagactgcagaggtctggaaacagaatcttgtctttacatttttgggttaaactgttagggctgacagcttgcaaagaggctaggctaggccacttgccctagggcagggggctgggtcatcaaaggaaacagcttcatgttcttatagctcctcctgcagctttaagggcacagctgggcagcacatgttggcctgtgtccagccatcagcgcccacctttttgaggccacagctgctccgttttcctcatcagaggttctctctttttctttgaaatttaagcattgttcagttatgaaacttagcattaatttctgtgcataaactaagactggttttgtccttttgatttctaatctcagttcttcgttcagttccaggaatttttctattgaggtgatgatcagctatgatcagtttcttatgtcttctttggaaatcgtgtccctgtaattgggttctccctgcattttctcttgtatgtgtcatctttcacattacaaaaagcctccacttacttagtctgttgtctggatatgtggagtagattgtttcattgttcaaaatatccactgcttctctctgtgggaggatttacaagctgcccttatgatgtcatccttggccatgtgacttgccagggccaatgaagtgagggtgaaagtgacagaggcctcttttgaacaagctctaagagctgccacatggtttgtttttccctctgccatgagagatgggggcttctccctcaagcctgggtcttggaataaagatgctgtgggacagagctgcagccaacctaccataaacaacctacaaaaaaagtgtgagaggaaaatcactttttgctgatttaagccactgagattttggggttgcttgttacagtagcatatcttagcttaaactgacaaatacatttctcaaatatattctttgtttcactggtatggtttcttggcaataccaattttgttttttacagcttccaacagtgattctattagaatcatacagatattaattttgttttgaattatatcattcagctgatgtatttttttatctttgaaaataattggtagtatttttctaaaatcttatgctctatatgtgagtctgttttagggttggctattctcatgaaattttgaaactggactgtagggatttttatttcctttacctatttactgcactttgagttttctctgttgtttcttcctgttttgctgaggggtttagaagcctcactggggtagaaaactaagttgtggggctggaggcgggacaccaaccagcaccatggttggtggcaggaagcctgcagttagagactgggcatgtgttttgctcattgctgttggtgctgctgaggaagtctttgtttcagtggattacagactgttttaattggattaaagggggaacctccttggcattgctcccctgttctttatcttcctggagataatccttttaggtgtctggagttggcgctcatgtcatcttcacacttagtctgccttctcccaggccctctctgtgtccctcagccatgccccatgatgagttctgtgtcccatacacctgcctggctattcccttctaattcttccccatagtatcactgtccctactgaatgtagagcccagaatggatctcagcgctcagctgccatctggactgtttggaggggatctctccctccttatctagggtatgatatcatgaattcacacagtggtggccacatcagtctgttggcttatattaagcttaaaggtagttgcatccagatcttctcccacaagctcctagttgagtcttttccacctgttcttatgtctgtgactctcaatccatctctgttgagctccgttttgctcattatggcccattggtccagatggccagatctttttgtatcccacacactgtattaagtctctctcaagtggaatcagtagcaatcaatatcctctgcagtcattgataaaactgttgagcagacaggtctgaggatagagccctaaggcctatcactagatactctgccagttgttatctctgaatgcacctaattgcactagcacccagcccacctcagagaggactgtgtgaatacctcattgaaatccaactctgcgtcaaagcctaaggttgttgactcttgaggtgctttagtcagtgtttgggaagaaacagatcacgtattccaaaggggcactgaacagatttgaatacagaggaacccagcagggacagggaagcactcagagggtatcagtgctagggagatgcactatccctgggcctgaagggacaggggctgtgttgctgagcctgagagaaggatgcagcaggcagagaggggctgccagtgggaactgtgtccttcactggggaacacagctactgtaaacccaggcccagctcagccctctgatctgctgatgcttcccggtggctgaagccaggtagaagccaaggggcaagggagcccaggagctgagtccatagaggccagctttgaagggcacacaacagagtggacgggagacaccagcagaataggcagctcaccaggtcaggctgtgatctcatgtgcttctctaatcctccatgttgtgctgcactaggttacttgttaatgtcccaaagagtcttgtgaattatatatacatatatgaagagagagagagagagacaaagagagatcccttgggatggagagagagagagagcttctctgtcaatcgtcacttttggaccctcttgccaacagggtgagtttaattgcagtcatggggacatgacgacatttaattaattaattatttagagacagggtctcactctgtcacccagggtggagtgcagtggtgccatcatggttcactgtagcctcagactcctgggctcaagtgatcctcccacctcagcctcctgaaatgctgggattacaggtgtgaaccacagcaccctgagacattgatatcatcttagcaaattcagtgcccatgggagccaactgggctgttccttgtgggagcagagcccctgccgtggccagagatgcagcctcagggtgacaataggggaaagaagagcagtcagagttcctaggagttggagctattgggtaggggcccatggagtcacccttctgtccagggctgtcctgagcaagacacacagacaaaattcacacagacccacctgtgcgtctggaaaagctatgccaactactgctgagctggaagatttctgtttcatgcctgtattttaaggaaaggcaagggctgtgatccgaatgaccctgggatcctctccaggagccctggttaccggctgttgtgcacaccatgggggaggccgtgtagtggttgggggtgcggcagcttcagaagacagggcagactgtgttggacatgggaggtgagatgtggtgtgtgtggagctgggcagcccaggcgaggcccctggggctcctgctcaagtggtctgtccacctgccgactcagcccagcacaagtgagtgcacgcagccatctctctagctctgacatcctagctgataggaccaaaccaaatccttatggggacagtgctggggacaccctaggtccccagggggcagtgcacgtcctctctgaggtgatgacaggtgtcagtttgccagtgccacaaggctgggcaccgggcaagagagcttgcgactgcaggaggaaaagggtgacccgagccacaggtgcacagagcctagccagatgtgcacacaggtggcaagggagctcagccactgcatcccaagggtggtgagcacagggagggcctcctgaggggctagtatatgagtgtcaggggacattgaccttggccttagtgtgcttctctaaaagtgctacccagcctccaagttgtgctgcactcagttacttgttaatgtcccaaagagtcttgtgaattatataggcattgatcccttgggatggagagacagcttctctgtccagcttctctggacacagtttgttttaattattaattttaaagtacagatacaatatagatgcatgacagaatatttgaaaataaagaaaagaaaagcatgtttgcatcttggcttgcttctttgcacgcccttcttaaatacttgtgattccccagggagtgggggacaagggtgtggggtgacatccaggtgggtggggagcccatggaacaggagacacagtgggaaaggatcagggagagtggctatgaccaagggcaggcctggtcttgggggtgtggaggccaggctcaggctggagttgtttgccctgggcttcctcatgtggctttctccaggggctggtccttatctgtgcttcctgagtcctggaggttttcccctgctttagtgagggtccctcaggcaaggccagcctgcttggggatccctggctggggctgtgcagccggcactggttcagccaggttcgcttgcaggaactcttgtctcctaggcatttctgtggtccagtggggagctgctgggcatctgacaggtgatgggcagccccaggcttcagcggctctgctttagtggcagcacagctggaagcctactgggccctgcctgccattgtggagaagcacacagggccagggtgtggccccagctgcatgaatcatccaggagtgtgtgaacactgactccaggctcccacactatggggctgcaacgtgagtatcaagggttttgaaagctacccaggtgattctaaggagcagctacggtagttctcaaattttatgtgcatccgtcacctggatcttgtcaaaagacacaattacagagccccatctcaaaagtttctgatttgctatgtttgtctgagaatttgtaagaaattgaaatctaacaagttcccaggagatgctggtgctgctggtctggggaccccactttgagaacctctggcctagatgaagatgatgtgggaaattctggttacctccagaaggcaagggcaggcattagctccctcagttggtgagggcaggtgtcagcactcacaggtggtgaggacaggtgttggttgtctcatggggttgtgagggaggaggctgactgtcacaggtgctgagggaaagtgttggttgctatcctgtgctaaggaaaggtgtttgctgtcatgcacataggtggtgtaggagggtgttgcctggtatcagtaatgaggaaagctgttggctgtaggtctgggtggcaagggaagggggtggcggtgacaggtgacaaatcaaggtgttagtgttggtgggtggtaaggaaagctgttggctttctgtacaggtggtgagggcaggtgctgcctgtcccagatggaggggaagtagctggcagtcacatacctgaggtgagggaaggtatggctttgtcatagatgtgagggtcggtgtcaagtgtcacagatggtgagggagttgttgctgtgtcatggatcgtgagggaaggtggttacaggtggagagggaaggggctggcccttctagctggctaacacggacattggcctatttcccactgaggctgaaggtggctccagctcccaagttccctcgtgtgtctgtcctgatcccctttcctgatgccctcggggcctggccttcttgtcctcccatgctgcagtatagtccaagaaggcgggtggagcttcagggcctggctgggtgggtgtgtctctgggcctgggagggaggagtgttcggatgggctggggagcggcaatgtacagctctgtgctgaggaagtgctttgcacaatttcatgctggccttcagtaatgcatctgccacagaacgatggccccaggaagcctcactccctgcacacattcaggaggcacatttcaatgcagaagccacaggaagagcgttcttatctctgtcttttatcatcagtttccaatgaagaatcacagcagcctgtgtcctggggctccagcctggtgcctgtggggaaaacagttctcccaagagcaggcctccgatgcagagatgcaggatgtggaacccggcttttggagatggccacatgcagatgagctgatcttaggggaaaagacagagctgtcagcctggctgtgtctgatgtccctggtttctatagctacagtaaatgtaattaccaaaaagtaacccttttcggatttcattgtaacctcagagagctaatgacatttactgggtttctagcaatctgggacaaaatgctcattttaaatttaacatgagtaatgccattttccatcttagttaagtactttgtgtcataaaagagttatctgcccagagcccctggttctgtcagtaaacatattacaaatattatcaccacttattttctggatgaaagatgtggcaaaggcccagagaaacactcctcctttacatttatgactttgcttggagactcagcaaattcagcatgaaatcactgtggaggtaattcaggctgtgcaccaatatctcacactcagccggaggcccccagagacggtaatgttatctcagggagcacaaactatgtaaatacatccttccaccactcgaccacagtaggcatcagatggtgtcacttggctaccaacaaaggtgacagatgctgagtgtctttggtgtagaaaaatggaagtcattgactgtagcttgttagggggaagatgagtttcttctccattcctggagacatacagaatttgcacaccaaagtagagatggtgtcaaaccacgtatttatttattcatctgtttattcatgcactttgtggatccattcacacagacccttaagtaatccttacagtgcagtgtgatgagtattctaatggagggatgtactaggcttgctgcagtggaggaagcacagagcaggaggcacatgaactgcctggggagtcccaggaggcccacaacgaaggtgatgttggaccaggcctggatggatgtgactgagttggacagcccgaggctgaaggaagacactgcaggctgggcgtgatattaacgctcttcttgggccacatcccggtctctgctggagtgaggactggcattgccctgcctcccttagaatccagtactgcttcacaggtccaaggcagagaggagagcaccctagggccgtgggtcagctggacctgggctctgtatctggctctgctacttagtagtggagcaactccaggtaaggtcagagcctcagtttcctcatgtatggaacggggacacccataccaacctctgcaagtgatagtgaggatgacatctaaccatagcccaagatgcaggtgccactgctggtcttgctgcagatgactcctttaggcaatgagagtgcctatcccatgggggaggtttgtgctcacaggatattcctgtgggaggtttgtgctcacagagcactctaagacagcccagccctgagctgctcagggtcatcaaaagtgtttttagatatgaatgtcaggccatacaggtgctaggtatctgtgcttcctgacccctggtgaaggcctgtttcaatctggctgatgcctggtcctggctctgacacttgtcagcagtgattggcagattctgaagtgtgacaactttggaggaggagcttctgagcttcccttcctgggtcagtgcccagccctgatcccagatccccaggccactcctgtcaggggcctgatgttctagggaggcaagcagagggctgtaaatctagggttttccaggaaaagctgaggtagtagccctgcaaggcttgagggaccagctcccgcagacatgagggaactgagcctcgggtatgaggaccagccatggccccaatgctgtcagtaatttggcataaatatgtcatattgcatataaaaatacatgcaatttttttttttttagtatttattgatcattcttgggtgtttctcggagagggggatttggcagggtcataggacaatagtggagggaaggtcagaagataaacatgtgaagaaaggtctctggttttcctaggcagagggccctgccgccttccttccgcagtgattgtgtccctgggtagttgagattagggagtggtgatgactcttaacgagtatgctgctttcaagcatctgtttaacaaagcacaacttgcaccgcccttaatccatttaacccttagtggacacagcacatgtttcagagagcacggggttgggggtaaggttatagattaacagcatcccaaggcagaagaatttttcctagtacaggacaaaatggagtctcctatgtctacttctttctacacagacacaataacaatctgatctctccttcctttccccacatttcccccttttctattcgacaaaacctcctttgtcatcatggcccgttctcaatgagctgttgggtacacctcccagacagggtggtggccgggcagaggggccccccacctcccagacggggtggcggccgggcagaggggctccccacttcccagaccgggtggctgggcagaggcgccccccacctcccagacggggcggcggctgggcgggggctgtcccccacctcccggactgggcggctggccaggcgggggctgccccccacctcccagacagggcagctggccaggcgggggctgccccccacctcccagactgggcagctggccgggcgggggctgccccccagtacacatgcaatttttaagcattccttagattagcctgctgagtgccccactgggagccaaaacacagcacactcacacaagctgcctgctgcttactgagaccatttctcttggctgatgaatacactgcaatgctgaaactgtcctgaatggctcttcttccaagaagacctgtgcatggggatggtaactgtagaaacggaggggctgctcaaaggcagcaggaggggaaaacttaatgttgaggggaagctggagaggtacctcagccaaccctctgcctttgcttagggccaccttgaatgcctggaacagagggaaacctgccctattcccagtctggaggagactgcatggaggagattttggccactggaagcaatgtccccactgacttttgcctttgcctcttctttatgtgaccttcctgttgactcatacatgcatgcatccatccacctactcacccatccatctatccacccacccagctacccacacatccatccattcacccatccaactacccacccattcatccatccttccacccacccatccatccatgcatccatccatctatccacccaccccccattcacctactcacctatccatccatctacccacccattcatctacccaccatccatccattcatccttccaccatccatccatttatcaaacattgatgaggagttactgtaccaggaactggggattggaaggttctattgtggggagatagacatagaagaacacatatattagaggacctggaggcccagtgatggaggtggtgattggaggctttctcaaggaaggccatctgagcattagcaaagtgatggttgagggagaggagtttcaggaagaagggactgcctgggcaaaggcatagaggcctgaaacagctatcttcctgttgtgggggagggtgtgggggggtagaaatggaggtgagtcggggtgtgtggaagacaaatggaggtggagtgtggtaggagaggagcttgggtggtagtcaagaccctcaaaggggatgccaactgttgtgcggctggtctgagggccaagctaggggcacaatcaggtctgtgttcaagtagatttgtctgatgtcagagactggagaggatgagttgtgggatatgagggtccaaggatggatccagaggagactgtgacttaactccagagaagtccttgaaggtaggactgatggtgaccttgggactcactagcctgtgggtggccaaatgccaagccctctctgatctcccaggtctaaccccaggacataggtcctgctgccaagggaggggcatcctgggatcccccatcctctaagaaatagggagatctcagtatgggaccctctccccacctaatcgtggctttccaggcatcatggctgtcagaaggggaaggtatttgggaacaggagggttttctgggagcccttgtggactgccctgcaccaaagttaagtgctgatctcggccccctggcagtcttggctcctccagtgagggaggcagctatcagacaggctggctccttctccctgggaaactgagggtgggggtggccctgtttcctaggtcctgcacggctcaagtgttgtgagctgatttgctttttcagctccttcaatcttgatagcaactgagaggtaagaatcgtcatgcccaggctgggcactgtattcctaacactttgggaggccaaggcaggtggatcactggagcccaggagttcaagaccaccctgagcaacatagtgagactccatgtctacaaaaaatacaaaaattagctgggtgtggtggtgcatgtttgtagtcccagctactcaggaggctgaagtaggaggatcgcttgagcccaggtggtggaggttgcagtgagttgagattgtgccgctgcagccagggcaacagagtgagaccttgtctcaaaaaaaaaaaaaaagaattgtcatgcccgatttgcagacagggagcagaggtctagagagattgggatttatccaaggttttgtacgaccagtgcagaaagaaaactttcaagtctgctgattctgaagctcatagttattttttgttgattgataatatattattgttttaaccactccaggttgcaatccctccgccctccctctcccaatttggttctgtagatctgtctgaatatgaccacctgctgaggtggggcccagcatggcagtgggtggtgctgtgcgtggggcctcagtgctcaggcagccccagcctgctgcgggggtgaaggtgggtgaaggtgactcccgctggcaggagctgcctcattagatggtgcctttgccatctgaagccactgtgtctgcaccgtctgcctactttgtggaagtggctttggtttattgggaaggaatttaataagcaagcagtgattctgaacattctgggggaagtgggaggcagtttgaggggtgggcagctccctctattgggccccttgggggcagctcttgttgatcccccatctctgtggaggttgtggggggatctggttgtcagggtggtcataaccacattctgggcctgcttggtggatctggagacaactaccaacacatgtttggtgttcagagggcttggtcttgggctcaagttggtcccttcagactctgcctgggctctgtgcctatgccaggcctccttgaaggaggagtgctgggccatcccctctctagttcatggctgggtgctccctggggtctcaggggcccagccggtgccagtctctgctctgtctagtgtgcttgttcccacattccttggcacttccccctctcaatcccagactctagctcccacctctctcatcttagtttcccaactttgaaaaaacttttaggggtagtcatggccccttactggaagacccagagcctttccttctagccttctgcccttggagactgcttagccaaactttcaccgttatggggctggtttggtctcttttttggtgactagtttgagaatttatctatccatccattcatccatctatctgtcaatccttttatactctttctacccacccagccaaccatccattcattcatctactcatctgtccatccatccattcatccatcatccatccatccatccatctgtccatccctctgtctttccatctacccacccatctattcatctacccacccatccactcatatatccatccatccatccgtctatccatctatccatccatccatccatctatccatccatctgtccatccctctgtccttccatctacttacccatctattcatctacccacccatccactcatatatccatccatccatccatccatcatccactcatccatccatccacctacccccttgcccacttgtccatctgtccttctgaccatcagtctatccagtcattgagccaacatgtatttactgacacctgtggtgttccaggcacggtgtcaggcagcatggacccaaaaagagatgaggctcatttctaattggagaagcaatgtgcagaggagacatcagtcattcttatggggccatatttagtgatccaaggatgccacagagcttggtgagctgtccaagggctctgaacaaatcagtacactcatcacagtgattgttactgaaattgagtggggaggggcatgtaggagccagcactggctgggggaggccctgtgtagggggttggctttggagaggtggctgctgtgagaacaccaggcctagaataagctttcaggctgtgccattccctgtgggtggcagggttgtcaggaagacaagagggggttcttgtgcaaggtacgtgggggtgggacagggttctgggcggtggagggtggatggagggacctggaaaaggaggcaggggctttgaggaggcccgggttaatggtagggaatgccagcacggggagatggctcagtggtccccatgtggatgggcagattctcaggctcctcctcttccctgtgagctggcccaggtgcggccgggttgtggtggctgagacccagctggagtcactgtcaggagctcccttgcttgttccttctgttggtggccagggctgggctcctctcagatagcagacaggccaggctgtcctcagagagaggccacgggagagcaagaagtgtccacacagggccctcagggagcccaggtgggccgtggcttcacaaggccctgtggctttacctgcctggctgtggttagtggggtcagggagtggcagggccggtgagtgcagctgaggggagagcatcctttgccctccaggctggctctaagtcaaggccagagaggttctggagcagcacaggccctggttcccagattctggtggcactgacctttcagcctcgtggctccctgggagagcagagctgggaaggacccttgtgtttttccctgaccctgggtcgtcttggcccccaggcacatgggtgcctgccccagcttttggttcacctctcccttttgtatggatcatggtgggtttgggagtatgcgtgcacactcttgacatctgcctcagggaggctggctgctgcagctggaatggggaccatgagggttccttcttcctgccttccctggcttcctgtgctgccccagccttcttcttctgctgacctctggcctgtggctttgtgagtgcccaaggccggccagctgtggctggcgggaagcgggggcttcctttctgcccaaacttctcatgggaaagtggggcagggacagctttggggcaggtgagtggtggctgctcactcatgtggcttcaaggaccacctgagatgcccattcaccacttggggacagcactgtcacaggcagttcctttgggtggggccttctctgttttgcagaggccaccaaggaatggagtaaagcgaatagtagaggaggaatggagtaaagcgaatggtagaggaggaatggagtaaagcaaatggtagaggaggaatggagtaaagcgaatggtagaggaggaatggagtaaagcgaatggtagaagaggaatggagtaaagcgaatggtagtaggagctgcagtgatgatggtgacaggccataggaatgggtgactgtctgaggggtaggtgctgggacatgagccccagcatgggcagtttcctaacttccccaggccactggcccacttgccgtaaggggtttctgtgccaactctgggagaagcaggcgggtagtgtcccctcttccctcccctggcttaatccactcccccagagcccaggagaggagtttccaggcattgggagctggacacaggccagttggtctacagggagccccaggctctgtaccaggccaggttcttagtgcctaaggtcccccgccatcgcctcaggaggagaaaggaaaaaatgaaaacgtggaatcagtgcgacaggggtctaattaccctgggtagcatcaagcctccaattttgggccctggtgctccttttaatttggggtgtttaaatatttacctgcaatggaggggaaaaaatcttttgggctgcaaggctattctggcagcaatgcactgagaaattcattaaaccacagttaattaggggatgaaagatacgtatatagctcattagctcaacccacataatttacatctctgaggatattcgaggactagctcagcttaggctctcagaaatggtgtcttgaaaggaaacctctcactttggctatttctttgggcatgtggcattagggagggggccatggctgccctctgtctgtccatccacgagagggtaaaggggcccaggcctcgctgcctcttgtgttcgccgctggagccagaggtggggctgactggctgtgctcctgctgccagggatgattaacgagggggtggcagcctccttgcaggcgcgctgcttagcataatggtgcggtgtctgagcaggctttaagctgcatcgaatccgatttctagatcagagacattatccccgatttaatctgtaatagttagagaaattagggcgggagcatcagatccacgtgtctcttaccagacaatagttcctgttctggcgcctgcctggggcctctgaggggaattagggaggccttggctctgctgaatctgtgtccaggacttgcacacacagcaggccccgcaactctgcccccttgaagggctgctcctctgtgccactgtcccaccaacttggggctatgacaggattactgaccttgctaagggtttctgcatagttgtcatcttttggtggatattggtaggaagtgcagttggttaaaaaaaaattccctggccaggtcccactatcagccctcaccctgattatgcccccaattgaggaagagagataaggagaggagctgtgtttgcatgcctatgtatatgtgtatacaggtgtgcacacatacatgtatacatgtatgtatatatgtgcacacacagtgcacacaagcacacgtgtgtgcatgtatgtgcaggtatgtatgcatgtgcttgtgtgcacatgtgtggcacgtgtgtgcagagatggtggcgaggactggggaaggctggattaaatgtcctgagggatcggcttggcccctgctcggccgtgacatctgcccgcgttgtgctgggggctgcgggtgaatggaggttggccagaatcagactggaaggtgggaaccccatgctgttaatgggtggcgctggcattttgggcaagcaactttcatttccaggccttgatttcctcgtctgtatactggcagcagcaatccctcactcagactatttttgaaaattaagggagatgatacaattgacactctttctccagggcctggcgtagaggaactgctccctctgtgttagctgttttcattattgttttttgttctttaccactctgagcctcagtttcctcatctgttaagtggggttgtctagctcacagggtggttatgaggagctgagttcccattggcatctgacacacaggacccagacagctgagtggctttgggccatgtcaatgaatgaggaggggtgggcacagcctgacagtgcttggctctccaggcctggttagggcccaggagtaactcagcccctaaagactccatctgaggatggctgacccctatcctgtcctcccccagaggagacctaccctattgagcacgggtctgcagagccaggcctctgggccttggtggtactgcctactggcaggtcctcttcctcttcttttgggtttgcacctgttcctgatggcacccacacctgcatcgggttccttgatatgaaccaccaccactgtcagatagcagcagcagcaccgagaattacagttgatatgcattctgctggagttgacatcttcacacccatcctgggaagtgggcattattataactcttgttttacaggcgaggaagctgagacacagggagcttgagcctgggcccagcgtaggcctgctggaggtggggagtttggtgaggcaggtggggctgggtgaggagctgatggacaagcagtgtccattggctgtcagtaccagatccctgtcctaccacttgttactgtgactgtgggcatgttacctctctgtgcctgagtttcctcatctgtggcctggatgtcattactcggaggatggagcaaggtcaccatgcaaagcaccagtatctggcacatggagagctctgattcttgggagtagggtgtgaagagtgtactgctggagaggcccttttggacgaggtggcctggacaggggttttggaggtgagcatgggcaggggctccagcttggccattcttcctatatggccttagccccttgcactctttaagttggctgccttacctatatccctttcaaaagttttaaaagtgccccctgcctcagcccaggctgagccagggcctgtgaatgcctgatgagggcatccctccaccagcaggcagctcaggatacgtcaagagcccttgtcctttcttggatgtcctgggaggggaagtgtggcagccctcagcctagccccctgaggctctcaaggtcagcgtctgggtcaggaggcagtctccctcttcctccataccctcatcagcaacttgtggggccttttgctccaaacactccatgatccaaaagctaggaatgccattgtcctcctccgatcttcgtatgtgttgttccttctgccaggaacacctgaccttattctttccttggtaaatcttgctctgccttcaaaaggctcagttcatgatttagcaaccacatactccctgccaggtgggctcattgtttccatgaggttccactgtgttgccagaacctagcacggggcttggcacatagtaaatgctcaacaaaaatctgtgtaattgaattagtgtacattattacaagccatctgcttcacgtctctgttgcttcttccatgtgagccattgaggccaggattcccctgagggtgggttgaagctcgatccttgcatccagggacccagcataggcattggcacacaggaggtgcttcctgagggtctgttgagctcagcaaaatacccggggctctgaccaggctgggtcaggtgggggtgtcttctgctccatccaggcagtctgggctcttgcaggtgatggcctcccaggggcagtggttgggggtttgtctcagcaggactttgagtaggaacttgcactagatcactcataactaattaattatattgtggaattgaggctcattcctattattcactgatgagaaaattaaagatctattgatattgcaataattaattgaataaaaatgtggaaataactatgcaaactctgtctaggattaagttagtgatactaactccctggtgaccagatagcggtgggggggagttctgcttaaggggagcatggcccaaatgaggcctggaggccctgcctgaggtggtgtggactgatgggtggtgctcgtttggcaggggcattgcccagagggactcagcctgcggctgtagggcccccccctgtaaagatgcctcactcttaacttgccagaagtggaggggtcctgatggccagggccagccagcgggtggagcctttgccctgaagggctaggacagagagggagttacaaagaggagccaaagtcacttcagggaatagacagcctgggtgaggtgaggagaggggctggggggccagggcatggtggactgaagggtcagagataaggtgagagttcatagccaaggctgagagtggtaaacaagtgggagctggtgcatcttgtgggcaacagggccttggacccctcacagagcactgggcagtggccactgattccaaagaatggtggcttctccccagaccctgttgcctagactttagcatcaggctgtgtctccttgtgtgcttgggtaaagaggcagtgtccattcaggcttcatgtccccagggccagtggggccttctcaggggctctgacccagcctggcagggacaccttccacgcctttccacattggctgctcctgctgctctgtgcttggctccccgaggctggtctggggctcccatgctgctatctctggaggatggggacctgaggtgaccaccagtgagccactgcttggcggcagcattgatgccatggctggaaagccacatgttgttaggttcaccctgatgcacctggtggctgctccactgcgtgcagctgctgcttggactccttatctgggcagcacattccataggggagcagttggtctcttctcttctggagctaaaatctgcttttcaagggtcccagctctgccctgcccacccccgcccccgccgcacccacccaagaggtgggcccctggacatatcttgccctcttgcgtacaatagccacagctctttttcagcacctgcttcactgacctgctgccttccctgcaccttcctctcagtgcccctggccctccagcatggggctcagtgcagaggaggcagcactccactctcattctccagatggtcccagaatgcccctgtgagccaggcacaatcccaggccaggttctagctcccaggaagctcatgtcctagtgatgtgtgtgctggagtgatgggggtggaaagtgtggaggcccagggccctgaaaccagacagccaggcttgcctctccccagccatgggcctcaggtacagtgtccgcttctgagccacagtttccttatctggaaatgtgatatttggtttcctggggcttccataacaaagtccctcaggctggtgggcttcaaaaacagatatttattttctcacagttctggaggctggaagtataagatcaatgtgttggcagggttggtttctgctgagcccctctccttagattgtagatggctgtcttctccctgtgtcttcacatggtcttccctctgtgtgtacctgtgtcctcatctcctcttcttatgaggacaccagtcttataaaggtggaatagggcccaccttcctgattcgttttaatttaatcacttctataaggaccctgcatttgatcattctcacattattataaataactacctgaaactgggtaatttataaagaaaagaggtttaattgtttctctgggctgtatatgaggcatggttaggaggcctctgaaaacgtacaatcgtggtggaaggtgaaagggaaacaggcatgtcttacatagctggagaagggagaagagagcaagagcaggtgctacttgcttttaaacaaccagattttgtgagaactcactcactattgcaagaatagcaagagggaaatttgcccccatgatccaatcacctcccaccaggcccctcctccaacacggggattataatttgagatttgggtggggacacaaatccaaaccatattattctgtccttggcccctcccaagtctcattttttatcacattgcaaaatacaatcaacccttctcaacagtcccccaagtcttaattaatttcaggattaactcaaaagtccacagtccaaagtctcatctgagacaaggcaagtaccttctgcctatgagcctgcaagctcaaaaccagttagtgacttccaagatacaatgggggtgcaggcattggctaaatacacccattccaagagggagaaatcagccaaaacaaaggggctacaggccccatgcaagcccaaaacccagtcactaaatcttaaagcttcaaaataatctcctttgactctatgtctcatatccaggcaacactaatacaaagggtgggctcgcagggccttgggcggctctgtccctatggctctgcagggctcagcctctacagctctggaggatggagtgttgagtgcctgtggcttttctaggcacatgttgcaagctgttggtggatctaccattctggggtctggaggatggtggccctcttcttacagctccactaggcagtgccccagtggagactctgtgtaggggctccaactccacattttctctccacactgccctagtagtggttctccatgaaggctctgcccctgcagcagacttctgcctggacatccaggcattttcatacatcctttgaaatctaggtggaggctcccaagcctcaactcgcacactttgcacacctgcaggtttaacacctgtggaagccagcaaggcttatggcttgcaccctctgaagcccaagctgtaccttgccccgccaaacgcttttttttttttttttttttttgagatggaatctcgctctgtcaccaggctggagtgcagtggtgcagtctcggctcactgcaacctctgcctcccaggttcaagtgattctcctgcctcagcctcccaagtagctgggactataggcatgtgccaccatgcccagctaatttttgtatttttagtagagatggggttgtatttttagtagagacggggggcaggatggtctcaatctcttgacctcatgatctgcctgcctcagcctcccaaagtgctgagattacaggcatgagccaccacccctggccaccttggcccttttagccatggctggagctggagtgcctgtgatgcagtgtgccatgtcccaaggctgcacagagcagcaggtcctgggccttgcctataaaaccattcttccctcctaggcctccaggcctgtgatgggagggctgctgcaaaggtctctgaaatgcctttgaggcattttccccattatcttggctatcaacatttggctcctctttacatatgcaaatttctgcagcctgcttgaattcttccccagaaaatgggtttttcttttctaccacatggccaggctgcaaattttccaaacttttatattcagcttccctcatcttcctgttttcttctgagccctccaaactgttccaacctctggcaattacccagttccaaagtcgcttctacattttcaggtatctttatactaatgccgcctttctcaataccaatttgctgtattcgtcggttctcaaattgctttaaagaactccctgagactgggtaatttataaagaaaagaagtttaattgactcagttccacaggctgtacaggaagcatgactaaggtaggcctcaggatcatggtggaaggcgaaggggaagcaggcatgtcttacatggcaggagagggagaaggagagaaggggaaggtgctacatgctttttttttttttttttgagacagagtctcgctctgttgcccaggctggagtgcagtggcacaatcttggctcactgcaagctccgcctcctgggttcatgccattctcctgcctcagcctcctgagtagctgggactacaggcacctgccaccatgcccagctaattttttgtatttttagtagagatggggtttcactgtgttagccaggctggtcttgaactcctgacctcgtgatccacccgccttggcctccaaaagtgttgggattacaggcgtgagccactgtgcccatccaggtgctacatgcttttaaacaacccgatcttccgaaaattcactcattattgtaagaacagcaagagggaaatccaccctcatgatctagtcacctcccaccaggctccccgtccaacactggggggattacaatttgacatgagatttgagcggagacacaaatccaaaccatatcagaccctgtatccaaataagttcacattctgaggtactgggggttagggcattttaagggagacacagttcagcccttaacataggaggtaatgtcacctcctcccaggagcgtagtgagaaatggcacagtgttcatgacacagatcctggcacagaggtctccctggctttcctgggctttgggtctctgaggggaaggagtgtggaagcagaagcagaggactgtgtcgtgcctgcccatggaattagaagttcttcctgagtgtatctcaccacgtctacctcccagcagcagtgctcaggggctccagcatggcctggcccccagagtgccactctgcctcctgctctctgctctcctgctaaccctgagagccaggcctggccacactcgctgggtcaggcgtgtagcccttccctggcacccaggatttgccatgcacattttccttctctgtgcttctgctcctcctgacccctgtgccaagacgtcttgtcatcctccccctactcacacctgtcccctttgagactgtgctccattttcagtgctcccgtaatgggtcctgcctgctgatattgcactttgctgtgtgaagactggagctagtgtcattgatgatgtatgcaggtggtggagggaacatgctggggatgccggaatggcctagggctcaagctgtcctgggtcctcatctgtattgcactgggtacttcaagttgaaggccaagaccatgcagaccttgacttctagggatgaagtggggacagtgatggtagtggtggctccgtttttcaatggcctatgtgacacactaggcactcatcatccttgttctttactacaacatggtaaagtgttatggcatgcttcaacttgcaggtgaagacatagagaggttgaaatattgcctaagagaaaaaacgtgcaaatcacatattttataatgaatttctgtccagaacatataaatgagtcttccaattcaataagacaagccacccaatacaaaatgggcaaaagatttgtatagatacttcaccaaaaaagagatacagatttcaaataaacatgcagaaaagatgttcaataatgttagtctttagggacatgcaaatcaaaacataatcagataccacttcacacccactaggatgactataataaaaaagacagtaacaagtgttttgagaatgtggagcaactggaaccctcatacactgccagcgggaatgcaaaatgatgcagctgctgcgaaaaacagtttgacagcttattaaaaagataaacacatatacttcaccatatcatttagcaattccactcctaggaatttgcgaaagagaaaaggaagcatatgtctatacaaagacttatacatgaatgttcatagcagcattatgtatgatggcctcaaactggatacaacacaaatgtccatcaactggtgaatagataaacaaaattggatattcctattcagtggaatactactcagaaatacaaaagaatgaaacactgatacacgcttaacatggatgaacctcaaaacattattctaagtgaaagaaggcagacacagaagactacgtgttgtatgattccatttatgtgcaatttccaaaaaaggcaaaactatagagacagaaaccagatgagtagctggctgtagctgggggtggaagcagagattgactgtaaacaggcatgaggggacctttggggtgtatggaaatattgtaaaactggatagtggggatggttgcacaattgtataaatttgctaaaactcaaaaccatgcaatgggtgaatttcatagtatgtagtttgtaccttaataaagctgtttaaaatgatcttgctgaagaccataactagaaaatggtcaaggcagaattcaaagcaagaccagccttctccaggcctgggtctgtggtccacactgccaggtacagagaggtcagcctcgggcaggagttgagagacctctgccctctgcaatgtgggagccgcaggggaggtgacagttgcatttggtggtgggtggaggactaggaggttgggactgggccttctccagggcctgaatatttgaggagggcatatgtatgagtgtgcaaggcccaaggagagagctggccaggctctggcccggggagtagggaggccgagagggctgaactgggcagctgcattttctttgggaaaaagtctatctgcatgcacgtccgtggagctttctcccctccactgtgctttctcctctcccctgcacctccctccctttgaggtttctccagctctattgatttggctggtggttccaccatcagtgcgcctgcaggtagtgattttccccatgaactgcatctcggctcattaaggaagccggtggctccctgtgtcgccagtatgcctgctgtattttgctgatgggcccagagctggatggaccatggaggctgctttctcaccctcccattctcatcattagcattccaaagtagaaaacaagcctgatgcttgctgcctaaatatttatggaatgctgctggggtcagaggatgagagcagcaagtgaaattaaagatttacaccgcaacaccaacctgggggggcttgggccatggcttgctttttgtgttgcttagagaaaagagttttctcttttctcccaggaaacttagtttttgtagatatttgaagcaaaatgcatgaaattttaatctcttgcttcacattggatcttcctaagttgttagttactaaggagccgatgagtgagaggtgcagacccttccgtgtgtctggatgcacacagggattctggaaaaaccaatgccattgtttggctttcattcttttggctccactggggagcagggctcatttgatagcgtgggagctgctgcctgtatagggattagctgggggcagacgtgcccgatgtttgtttctcaataaccctgaaagctggccacttctctctttctagggtggctctgatgaaacctcccattttaaattggaggaaggaaaagggggatggagcatttctgccgggccagctaaggtctggtagcaaacagaccctgaacagagttttcctagaagtgtgggcaaagttagggcaccagctatgttgaagtggcctcaggaggtgttcctgtccctagtcctgaaggggcacagagaggggacagcaactggagcaggtagtgcagccacagtcaacccagcaaggaggcagccaggggagaagcacccccaccctcacccaccctcctccccacccccaccccctctccaccctctcatttcctgcctgtgtctcccattggtcaaatcaccaagggacctggggacaagggagtcttggccatgccgtccacagcagtcagccttccagagtcccagtagtggatctggagggcccaattgtctccagtcacgttccctagaggcagagcctgggacaggggttgggtgtctgagatttatggagggaagcaggttagagaggaaaaagagacaaggaaggatgtggtatcatgtaagtctagcctgtcctgatcagggactctggaacatagagttgttcccctctggagggaaggaggggtgacctcctctaccaccaccactgtctgatgttggctgtgagctaccctagggtggggagtgggccatcccctccggcagctcccctgggtgagggaagtttgctggagaagggggcacctatgaggcccagctgcctaacatttagagcaagaggggatgggagtgtccatctgtaaagggggcctggctgggacactaatagcatctgcgactccatcagggaacagcctccgcaccacagcctggctttgtgggaggactgatgtcaattagcagacacctctggattatagaaactggccccttgctcccagccatctcatctggggaattaatatgagtgctagtcttctcagaagctgcaccgaacctggctgaggtggtcacaacagaggcagagccccttctgcagctgacggctttccctctctcggtggctgagactgttcagctttccctaaaacgctccagccggccacttcagtgggtgtcacatcctgtcccccagcctctgccatagacatcccgttctcctgcaaaggcctggctgaagtactctctttggttatcctgagaaattatcctgaagggttcctgcaagtgaagaattttagatgagggtatttatcagagccaagcattgataataaatgatgcctgatttttttattagaggagccacataaatgtggctgcttcaactttttaactcttgggaaagcttgaagttgcaggctactctgctgtgggagagtgccagctaatcaggtcccattcatatgcaaagcacttgctaagctgagttcatcaaaatgcagtcgtttcttaaaaaaaaatatttatagactttccctccctgcaaaagactgcaaggaagatggatagtgaaaaatacaaattgttaatgccctgaaaaggaagtctcatcctgagccttgctaaagcattccctattctttgagaaaaacttaaaaatgggcatttgtactctagatttctctacttccctttactaaactctctccctcctcttattccagtcacttcgcagtatctctttggagtctagtttgatctgtccaggtggtggtgggggtaggttcaggatgggtgggaaatacaacaggagaggcagctgggctgtatcgactcctgccttgactgtacctgacacagtgcagtcttgggcttgtgaaacctcactgagtctttgcatcaagtctgtccccattatagagactggaaaactgaggctcagagagatgcccagtgactgccagccagagaaccctcagtgtatcagttcctgagggagcgggagcggcattccagagcatgcgggaacagtgctgctcagcttgccttttctcctggctccctaatacaacggctgcgttattcccctggggccctccctggcctcccagttttcttcctcgtgggattgggatgctctattctcattgcacttagggatgagagaggagaaaacagggaaagggaagctgggattcagggcttcctggcccacttctctacccttgtttctcctctcttatacccaagtgcagtgagaagagggtaccccagtctctgggaggtaaaaaaaaatgtccatgcggatacacgggagggtttgcagtataggagcaaccctcaccccatccctcacccaatgaacatttgttgagtgtgttctgtgtgccagcctcggggaatcatggtcacatggaggtcctggactgcttgcttccttggggagacagacagttaaatgcatgttactgtgaagaggtttgctgatgagtaactgaagacactgcgtctccaaatacaataggaggcacagactaggtgctgattgaggtcagctgtctaatgactcctgtggtggttaataatagctgctcactctgcttccttttgtggtagcaaataccctttggagacacacttggacaggttattcttcccatttatcaaatgggaaagctgaggcctacagagataacatgaccccgactgtgctcttcatccaaagcttttgctgtctcattgcttgaatacttgtggagagagagaatggttgacagtagggccatgggcctgcctggttcagcatgccctggctcagggcacaagggtccacttagggggtctggaatagggttacctgtggcctgctggatcaggggccattagagccagagcctctgtccggagtgcagaatgacttggccctgcttcccaggcagatggctgtgccctgagtgtgcagagatggtgggggtcaagagggcatttctgacctcccaggaaccagcccgggccccctgcctccctcctgggagacactatcttcagatttccagcagattagcagcaaaccaaccatttccgcttggaatttgaaattgattgtggacaattttctgacatgcatgtctcctgccatttgcaaaatgtgtatcacaggccccttctggaagcctagctgggcaggcagttctccctccgtccctggccaccaccacagatgtttgggtttgctggagccagagttgtgcttagagaccttggaaacagcccagtgctgagaggcctggtcctcgggaaagtctcatggaaccagggattgcagcttgggtagaagtgtggccacttgggcctgtcactgcccacaccgccgggcacagagatgtgtgtgtattactcatgtcaccatccatggagggagcccatctgccagccctgggtgggagatggatagatgggttggacatgatcctgcttggaggagctcacagaccagagggggagacagctctggcaacacagaggagagatctgggagaaatcaggggagtcttcgtggaggaggtgacaactgagcaaactcttgaagtatgagtaggaatttatagtggtcagaggagacttatgcacatagaggaaacagggtatgcaaaagtacaaaatgttgaaaggtgacatgtgttcagggaacagtgggaagttcaggtgtggagacagaaagaaatgcatgtttcctcgctccaggctcaatgctcagccaggtttagtgctgatgatggcctctccagagttgatcaggagaagccgtttgagctctgtctgctgtcctttggttgtgcattgtcactgagtggcttctgggaggggtgagacttccagctccgagggaagccaaatgtggcacaggagttcctggtggtgttgtccccactggagactcatttcctcatctgtgatagaaactcccccaggcaactgtgtgaccagagaagtggagacctgtggtggcctctctcctccgtagttcttgatatgattgcccagtctggattggggtagggtgggtggtggttctgggatggggcgggactgtagggtgaggtcaggcagggcctgaagccaggtttaggaggcaggggcaagttgggctcgtggtgggctgcttgaggctggctggtcaccataggcaggagggctaaggccgggaggaggagctgctgctaccaggagcaggatgcaggggctggggatacctggaggctgttactccttcacttaccaatggtcccatgttgagtcaacaagcaccctcagggcctgctctgggccaggctctggggatcccaaggtgaggcagacaggtgtggccatatggtggagtgactgcctgaggacaggactctatgtgtggtggtgtcttacagaggacatagcctagcctggggttcagggcaggtcatctgaaggagaggtgtctgggcaggacttagtgaagtgggggaggttgtggaggaggctacagcagatgccaggtatgggtaggtggacttggctggcccgcacgcccggctatctgccctggccacgccatcagaagggttgaagccagatgagttgaactccaggcagtgctgggctatgacaaacctgcttaagaatgaagcttctggggtccctggaatgactggggcctgtgtactcccagaagtgcacccactgccacccccagatcatgagaatagctgaaactcatagagggtgccctgtgagtcaggctcggctctcagcaatttacaccatttactcactcagcctgtgaggcggggctattattagcccgttttgccaatgaggaaattaggcacagagaagttaggtgtcttgcccaaggtcacagagttaagtggctttaaccttggcagcctggcttcttcatccttactctgaaccccacactctgcttgcagtgctgcctggtgttttggtggcctcaggccccagcaggtgccttagctgctcctctgccctgggaggagggggactggcagtgctggccccaggcacttgctagagagtggggtggcctggcttaggctgaagcactgaggttcccatgggaggcacagaggcacatggctagagagattgagggaatggggctgagtcagggttcacaaagtagaaggcccaaaggagatcatgtggggaccctcccccagctacaagcagtccctattcggagggcacggagccccactctggaccaaggcagcccctccctactgtgagtacccactgcctccacacccacacccttgttcagggtgcctctgagcaagtggagcatttagaggggtcacacttctctccctcagtctctgctgttgcctctttggtgttgaagagaccaatgcaagatgcccttaggggtccctcctggggtcccagctctttagagcaatgaactggttgccaagtgagtataaaagagtggccgggccaggagggaacccacacatccacttcctgaggggtgacccagctccctgaatgtgtgtgtgtgggtgtctcttggtgtctccaagctctgctgtgggctggagctcctgggacactgttgttctcattgggtactggggggtccaggagagtgatttttctgctggccttggtggagtaggcccatctcctgccatccctcatacggggccaacacctggcagctctgggatgcctggccagggtgtcaggtggaattaactggcagcagggccaggtgggtgttgattgaggctgattgctggaaggcagcggctgcaggctgcgcaaagctatttccagctgctccaattgtatcaaggaggcttaatccttctaagtgcctttgtggttgggtggtgtggagtgaggatgggggaccaaggccagagcaaggtcagacttcctctgattgtctacgtttcctctcccattcaccccacccaccccctcccatgcaccaagccacccccattcactcctcaccacaccatcctctcccccacccctccatccacccatgtacacatccatccggccacctactcacccacccacctacacatccatccacccacctactcaaccaaccacctacacatccatccacccacctactcacccaaccacctacatattcatccacccacctactcacccactcacctcacatccatccaccccaacccggtcccccatccatccacgcattcaaccatctttccttccatccatccaactatccttccatccacccatctgttgatctatccattcacccatcaatctgcccacccatctacctacccatctgtctgttcttttgtggccatcattcagcattttcctcagtgtttactatgtatctaccatgtgtcaggcaccatgcagggcctggggctaagcacagatgaggcatggcctaggtcctgcagtggctcacagtctagtggtgggaacggtgcatggagcacccatgatggagggaggatggccaccacaggagctcaccttgggaggggagccatgctgaggaccaagcagggacttcacaggtgggagctgggccgagcatcctccaggcagagggctggcatgggctggggctcagacgtgtgaggaaggacagcagagtaaggaatggggtgggagcaggtattgggaagggactggggaactgggctggctgagctcatgagggtcttggggctgggtctctggctgctagttctgtgagaatgggagtctttgagagtcttaagcaggtgtgggttttaggaagattgctcctgtgagcagttagcccaagaggcaaggctggaggcaggaaaatgaaaagaccaggagctcctgccttggtgctggggctgcagccccccactactatgagcaagttcttagggagtactatgagctctccaccacccctgccttaatgctggtctcatgggccacctcagtgcctatgacccaccatacaccccagaagggcccctttgaggggaggggcggccccagttgccattgtctttcgtcttccttttctcaactccacctttccaggcttctcctttccccaggctcagtccctcctctcaagcctcttccccactgggaagctgccctggtagagcaggtggcttcacccaggcccatatcagagggaggctccctttcttgactctgtggctttggaggcttcccctttccaccagctgcaggcgcacagctcagggtggctcctctggtagatgcttgataatgtagtgaaggataaactgcagggcaggaggcctgtgccagcagggcatgcagcaccaaatcaggaaaagcagcaaggctgaggcctggtaattccctgcagttgtctccaggtggcctttggcagttccatttcctagttagtgtgtgcaagctggctgagctcagggaggaccgccagctggtttagggggctgcgggtgaggggaggcctggctgcctctctgctgggactgctgcttctggagggagtgggtgaggaggccgggctgggacttggggcacttgtccaaggtgactcctgttgctgccaacaccccactccaatgggaaaactgaaggtgggagggtatgctggggtgggagggtatgctggggtgggagtgagggtgtgctggggtgggagggtatgctggggtgggagggtatgctggggtgggagggtgtgctggggtgggctctgaccactgcttcatggggtgtcagctcagggaggtggcttttcaatagctttgcatatatgagtgaggcgtatgacgtgtgacggccaggggtgggtgggtaggatccccagtaggtctgtgcgggaaacaggcaggtcccctgtccagagacgtggctctgaggtcttccgggatgtccttcttccctttcgttcttacgctcttcttgcttctcatgcctctgtcctttgccccatcagcctacctgtccacctgcagggtcttgtcaccttcattaggtgactattaattgaatcgggcctgtggaattccaaagccccaatgagtgggtccccatgaggcccccagctctgtagaaaagaccccacgaatgcctgcagccttgatggtgacctgatgctcacacacggccgtgatgtcatggttgctgtaataacatgcaggttcatttgctgagggcacattggcttgaggtcacaatgagtgctctccagcagcaggtactaaagtacagctacctcatgtaggagccagttttgaactttataaaagggtcctgtcacccaaagagctgggggacctctaagtttctgagctggtccttagcagttctttctgctcctctccccaacaacttgaggcccatgggccttcttggtccccctccagggcagggtgtctggcagatgctgtctttcatgtctaggtggggctggagctgggacgctagcagctctcctgtaccttctggaccctgctgtctccaggccgacatccagccactgggcctccttccctgcagaaatacacgctttgagaagagtgcaaattgccgtgagcaatatatagtcctcatctgaatacgattatgcttaaacgctataaatattcgtaattctcagccttgagtactgcttcccttggtgttatatccttttaaaaaacactcaaccatttaaggcaaaaaagtgctgagctcatcctgggcagtttcctttgctggtgtcatggctggagaaatgcaagtagtgaatcatgactcttggctcttagtctgtggtttacctcgggctcctggacaagtcactgagctattcagctccccaccggcctgggaggggctgggaaatgtcagcccctaccttcctccccgcccctctgtcttcacaccagggttgtctgctggaaaactggagtcagggttctgtagggcaaaatcgatgctttctatgtgaaaccagtcctctgcacctgggcttgatctaatgcaatagtttcattcactccttcagtaaacattcctccggcacctgtgccttggggaccctgaagtggcctcaacacggttcctaaattccaacagctcacagcctggtggtggaggcagagggtgatgattcagagtgataatgccccggctgagctgagctctggatgttgcgagggtgggaaaatctcaagggcttcctgggggaaggggcacttgaattgaactttgaagggtgaggaggaagggacagagagccatgggcttggtggttggtgtgacaatggctgagcttattttagtggccagtgctctggatggctgcgtagagggaggtgaaacctgggtgcactaaggatagcagctggctgtctcctcagcttacaccttcctttagcttcctagagcccctacgggttgatggaggtgcaggacagctgccatctgggctggggtctttgagagtagagtgcgtctcccctatttttgtgctccccacatcccatcctgcccagtccccatgagaacctgtcagagcagaagcagccatggatccagctgtggcagggcagtgggtggcagcatcctcatgcctgggactccttgtgttctcctctggggactcccaagcccaggagccttgggttggtctcttttctcatgagctgaatggagtgtgggccacctttcaagaatgtactgggggaggaggaggcttacccctctctggtaaggctctgcctgggtaggtgtggacacttgggctcacttagccagtcagcacactttccttcaaccaatgctgttgtgacttaagcagatgcagaaaataggtgtgtgcatctgtgtatgctgggagtgtcgggggtgggagcttgggagggtggggattccgggagttcaagaggttggagggggtgaaaccggagtacagttggagggaacatgtgcctggcatcccaggaaggttttccttctttcatgtgacttggaatatcagtgtatcacctgctggtccttggtctgtcatcttctggtctttggtttatcacctgctggtccttagcctatcacctgctggtccttggtctatcatctgctggtccttggtctatcacttgctggtccctggtctatcacctgctggtccttggtccatcacttgctggtccctcgtctgtcatctgctggtccttggtctatcacttgctggtccctggtctatcacctgctggtccttcgtctgtgatagacacagcatgcagttgtcacttgctgtctgtgctacctcagtcacttcttggaaagccgacccaagctgggctggggattgcccactcccatgggcttgagggagggagtgcccctgcctcaaagcctgagctgagctgcccttgttggagacagtgcagaggtaggcctcagagcccctccccatacctccagaactgcctggaatcatccctccaaatctcctgagaggttcagtggccttgggtgtgactgggaaagctccctgcaccatcatgggaatgcctcctcagcgcagagcagccatgtgtgcatgtgctgggggccatgtgcctgtgggtggtgtgcctgcatgcgtgccaggcagggcatttggaggggccgagcccccagccacagctccgcagcttcctgttccttctctggtgtgtgtcctggcagctgtgtccttctgcctgtcatctctttgtctctttccagggaaggtgtctgggcagggggtggagaaagggagcaccatcttccatgcgcagggcagggctggagctgagcaccagagcaacctactgtgccctccagacctagccatcccgctctcagccactttccctgcagaaaaaggcccttagggaatgcagagagcaatgagcagtatgtggtattttggggggattctcagagcccctctgccttggtttggtataccatagtgctccccagaagcaggtcagtggcatgggagcatacatgcccaggcttctctcccagccagcaggagctcatagttcacagtggggtggggaccctatgaccccagctgagcttgctgtggagggggggatgcagtctcgcatgtccccccagggggtgacggtgctgttttgggtgtgcacctgacactcctagcccttgcctgactgtggccctagtgcccttgtggcttggtgttgtggtgaggaagggggtgccctgccccccttcagctgggctccagggaagtgctcgggctctgtgacttgtgtccactccaacttggggaatggcataatgcagttttgcccatgcttacaccccttctccccttcagaggtcttggatctgatctgtcccagtggctggccctggcacttaggggctcctacagctccactgccctgggttgccaggctgcctctcctggggtgcgtctttcagaggcccctccatttttcagtgaacaggcctgctccccagctgctgggtggcccctaagctcagcctggcctgcaacatgcatggtttctatggggcttcttcaggacagagtggggtgaaggccccgcttttcctccccacctgacccactgctcccaccaccccttccctgggcactcagatggcaccgagtccctcaaggctctgagggcagctaaggtgctgactggaggctgaaggactgaccacgccctccccctgggctgggaggcacctggaagcccaggcttggggtgggcagagtgtgccccttggaagccctgagttcttgtcctagctcactccccactagccatgcagtggatcatacctggcaagagggctcacatcgccaagcttcaggtgccccctctgcaaatgggtggccccccctctaggcctgggaggatgccatgagatggcatgcaggaccctcggggaccaccgcgtggtaggtgcccttccctagtcctgccagcttcagggttcttggggtttggtgtctgtccttggcctgtccccttcttccccccatgctttagctggctctgtcccctgtttctgtgatggccctgatgctgttcctgctgcctcccaccccctgccctccctacccctgttccttccgggtgaggaggaggaggaggaggagaaggaggaggagggggagggggcttccacctccagccctctggctgcatcctccctgtggccactttcccagaagcaagctctgagcaggtcctgccttcaaggctccctgctgctcctgggatcaaaacaaagcccctcagctgatcatccaaagacttctggggactccaccctccctttcctcctaacagccgtcacccaacctctcaccccagtgtgagcgggccattcctggagggtgctgggccttggctcacagcagccactggcctgggttgtcctctttctctgccccagcatcagctgctgtcctctgtgaagcccccttgacaccccaggctacatgactgtccacccccactccacctgctggacctccaccactcccacagcccacagcccacaaaggcttcctctccagatagcctttgctggggcctgtgctgggatctgcctcagttctgtgttcccagcacggcgtgcttgaggagttttgtggggggtttccgggaggcaatttgataacctgctgggagaacgtggctcccaatctgtctattatggctagaaatgtgctggtgggaagatggagcctcaccaaccaggattctctaaagttcctctctggtttgtgagttttgttgtattatttttcaattttctctgagcatctgctactgtgaaaattttcattatcactggcaaagagcccctctcatccctgctggctgcaggagatttccgatttctctccccgactgctctgaagcacctgggggctgagatggtaacgtcccagggccagctgggctctgtctcagaaaatattaggagcagggccaggctgaatggccagggaggtgctggccatggcttatgtcgtgatggctttgcctcctcctggaggcgcagggttgatcaagctgagaaagctggctttgggggccagtcagcacctgtatccacttttccatcttgagagacccttgcccccagggtggtcccctcagatgctggtgctgggtgcatggcgcacccccgacacctggctgactcattctctaaaacaggcctcatgtcaacaacttcagaggctgtgtgctgtcatgctggctgttaggacggcgatgaggtgttggaaagcaaagcccatgcaaaacttggggtgaatgagaagagctcctgcagcatgtgggacacaggctgggtgtggcacccctcacccctcacctgcagaattgcacctgggcatcctgctcagagatggcaccgatgagcagaggatggccttggacatgcccaggcgtctgaccatcagcccagacctcactctcctagcttggttttgagtttgaacctggccaggctgctttcttctcactcttcttgcagtgggtggtaagttacctgtacttactggtgctggtcaaagtgcttcctcagtactaactcgactctcattattactccatgaggtcaggactatcataaccgcgttttcagggtagggcatggagcaggtgtgacttgcccacagcagtaaggtgcagagcagggattcgagtccgggtagttcggtgccagaacctatcctcttaccgctgggccagtccttctctctgagagttctggagagcctcctttctcttgtgtcaatcggcgtcctctgcactaatgtggcttttagtttcaaaggggccaagaaggagtgtgtttagcacttgattggtaaatgaatgaatgaatgaatgaatgaacacttcccgaggaggaggaattagcattttagaacttattcaagatctattttgtgccagtggctatattttcacatctgtgtgtggtgcaggtgccatgacttgttcttctctgcccttcccccattttacaaaataaggcatgaggcatgaccaacccaggctctgggctgctgtgtggtagaggtgggctggggcctgggcttcgtgattgccaagtccattctctttgcacagcccaggctgcctcccggggggagcatctgtggactggctggacagagttagtttgtgagagatgccttcagcttccgtagtgtcactttgcctcttcctcattctgttcacagtcccctggagttagcattttgaccagtaaatgtggacaacagtccacttgcacttggccacataagaatcacaagaaagatataaagaacagaaaggacctgggatgggggaacccgctccatttacccccactacctccccagcttcaccccagctctctccctcctgccctcactctgggacggggggccacacgtgaccagggctgtaggggagtagtgtgcagagcagggagaaggggagcgggggtgctgcccctcataggtcatctccctgggcttggctgcaaggcatgctgggggcttgctggcagccaaggtcggtaaacaactaggctgggcagagtgagggaggggcggcgtctgtggagggatggcccttgaagagggacctgtagcccaaatacctggtttaagggccattgggcagttggcagcgttgaactcacactggagggtgggcacagtcccctggtaatggagtcaggaaaggtggacgatggattgggggttctgggtcaagagcccagcagctgggggtgtaggggtggcacattccccttgagggaatgggctagacctgcccattggcaggcttcaggccagtgcttctgtcttggtccccaccaggtgacaggccagggagcggcacagagggctgcatgcactcccacctgacctgcccaggcagttgtagagggagtgaggtgggtgtgggcatccctgtgacttttaccccagagacagacccacagggtgatgactggctgccattgcctatggtttgcctggtgagcacagctgtctcgggctgtgctgtcgatagtgggtggaccagggccaggccaggatgatgtacatcccgcattgtcctgttgctgcctgctgctccaaggcatccagagctgggggtcccactccatgcggggtgctagggagacacaagtcctgagggtgctcagtgcaggtggtgacagggaccaaggagcagtcaatgacactgagctgcaatcacatataaagcagaaagtgacatcagaggaagggcctgtgttgtcctgattgtgggtaaacaagaaggtccctggagaggaggaggcacttgtctgggtagatgagaaggattcaccaggtagataggggccaacaggggacagtgagcttctggcaggggaacagcaggtgcagagatgaggacacagcatagcctccagaccctgcgctatatcctgaagcctggaggttgccctgggaagtctgctggctatgctgcaggattagtgcaaggccttggagctggggcttggggctggttaggctggcagggtgggccactccaacctttcctagaagggctgctggccaaggagtgagttttgctcctgctgcatgaatcacctggggtgggagagactagacagctgagggcctagcagggggcatcctggtcagcttccaaatgcagggtggagatgagagccttggcacagacaggagctttggagcagtcagccctaccagggaggcaggacataggctgcggtggggggagtaatttccacccatacacctgcatatacctttgctggtgcgtgcatgaactcacacacacacgcgcacaagcacacacacacaggaccaagactcagaaagtcagaagtaatgataaggagaatgagagagccagagaaagctaaaaacaaaagtcagacataggttgagatgaagagggagagccagaaacctcacagagcctcagttctccatctgggagggatgctggagcctgctgtctggatgttcttgtctttcaggagacaaatgcaggtggggtaggggagaattggacacaggatcaggcccggtggcccggggctgcagggagggctgaggcaggctctgtggtgtggcctgtccataggagtctaactgcaggctccggttcctcagacctggccttcatgggcttctcagtggtctgttaccaggagaccagctggcccaaaggccagcaggaggagagaccaccgtgtagctccctccctgagcctgttttagggtgcagtggacattctctgttcccatggcccagtgacttctggagaggtgttgcttacgaggtgttgcttacaggagcaccaaacccgcaggcatgtggaatttctgggaagccggctgcctctttcctagggccaggccatgattggtgtctggccaagagcttttctgctcaacagtgctgagactacctctgcccgcccagactgaatgaaggaattggccccaagctcctccactctctacttggccgagtctctaaaaacaggatcccatatgagagggctgtgaataacaacagaagttgatccttttttgaacacttactatgtaacaaacgttattctaaactttttacatgaattagttcatttaattctcatgtcagccctaggaggtgggactgttattatccatttacaggtgagggatagaggctcagggaggttaagtggcttgcctgagggcacacagctaccacagtggcctgactgtctcctgggctggtctcttaactttgagatcagagacagctcagggtttgaacccaggctcccctgtgattttaggcaatgctgtaacctaggatctctgctcctgttcctcctgtctagaatggggtagtagtacccacttcccagggaggccatgcggttcagtgattagttgagggggccctggcacagctcccttcctcctctcccacttgtctgcagcagaaggcatgtccttgccccaccctgagcactgccataaccttatcctctttttcagcctttttctaaacagagctggaagcaccttcttggttaccctagggatccttttctggccccagccttccctggatgtggccacacctgtccctttctttcccccttagtctatgtcctgggcatagccgagctcctcagagagctccctgtgctgcccaagtctccaccctctctgagccagctgtgcttcatagtcttgggacctgagttgtcctgcctggggccccatggaaccaagggttctcacatctggctgcttgtctctcccttcctttgccagccccaggacagcaccgttgctttctcccaagcttctcgttgtccttttctgaccccgaaccactccctccttcttgggcagaattagataaagtgaattgcccaggactcttgactcattcatgcagggactggattctgaaccaagtctaggaggccccatattccaagatcttttctcattgtgcgctgaaggctaactctagtcttggacaagacagaattttccattgcctcattcctaacataagttccatcccattgattctctgacttactcgtttaccttgaaacactgatatttcaaatgatttccctagtatggatgtttctgtgctttcactcagctcattcaattgttccatatcttctgaatatctctgcttcaggccctgaccctgaagatacacaaagccatgagcctcagctcctcctcttgtgaccttagggattaagcatgagataatatgatatatatgcaatagaagtgtgctaggataaagtattcctggacatgcaggaaaaggaatggttaactttgcctagcaggggaaaagtcaaataatgccaaagagcaagaggcatttgaggtggattttcgggagtgagtggaagtgtgaaaggcaaagtaggggaggaagagcatttcaggaaaagggaatcagcacgtgcaaagatagagattagaatgggcatgtctacatgtagagagcatggggcacgtgaaggttggcaagtacactggtgccattgtgatgtgtggagctggggagcggtggaggatctcacaaactggactttgatcacttgcagtggggagcatggctaatatttcaagggcgtgcttgtcactgactttggtctgtagagtgggttggagaaagaagggctgggaggcagggagaccagttggctgataggggaggaatacagacattcaaaggcagagtgaggaggtgacatcttgtgggctggcctggggctgaggaggagcccaggaggagctgtctgggcttgggttcctgggagtgcttcaggaagccccattgctcagttgctttcgaggttctccaagacgctccctgcaggcatgcccaggactcatcactgtcctgatttaactttcacagtgtaggcttccatgtgaatcctggctggggagcctaacgtttcattggcggagcagtaaaagtcattaatgaggagctggagagctataaataagcgagcatgatcccacccagtgttccctgtttccaatctgcaggagcagggaattggttttgattcattaattgttagaggaatgaggccccagagatcccatggtgctgccagctcttccccaccctcctggtctgcttcgtgcatcctgactgcatgagctgcccacctgccctggacgacagtccgtcattcctcaggaccattcggctctgctcccctgggcctctctgggctaggctgagcttgaggccagagaggctggggctcccagcctggtagtgctcctggtgagatacttgcacagctgctgctgcctgagccaggcctcaggctcatacctcttccctccccactgtccccttggttctctgcaaactctcagtgaacccctccttagaaggagtgttggctttaaggaactggctccctttctccaaattgtgggatatggctttgccttttggtgaacatgatcactgtgagaccttggcaagtttgaaaactttgtgtctcacccacgaaatctggactccagttgtgcttattttccagagttgttaggaggattcttttctttttttgatacggagtcttgctttgtagcccaggatgaagtgcagtggcactatcttggcttactgcaacctccgcctcctgggttcaagcaattcccataccttgggcttccgagtagctgggattataggcatgggccaccatgcccagtaaatttttctgtattttttttaagtagagacaggatttcaccatgttgcccaggctggtctcaaactcccaagctcaggcaatctgcccaccttggcctcccaaagtgctaggattacaggcatgagccacagattacatagtttcttgctgtgctgtgctgtgctgggtgctgggggtcaggggggcgggtaagcagtgaaggtgcttctgcttatgggcagaatgagaccacacaaaatagtccaacatggcaaatgtttgttagtgccaggaaggcaaaccatggtgagggaagactggggacggtgtggaaggttctctagagggaatgatggttacctacccagcacacaggagaaggagaattagccagacagacgtagcagaagtactttaggcagtggggagagtgtgggaagagtcctggcagtgagcaagagcttgggacgcttgagttactgcacaaaggcctgctacctggaacgcagggcatagggtgtggagtatgctgggcctgtgggtcccattagggtgtgcgttttgttttaaggccagtgggaagctcatgtgattttaagcagggacagcactgtctggttggtgctttataaaggccagtccactagtgtgtagaatggacagtgtgtccatctgggacaagtggggaggttggaggtgtaagggtccactggagaggtgtcagtgttctggcccaaggtgatggcagtggagtggaggaaagtcgacaggctcaagatatatttgggagataaagcattcaggcctggtggtggcttgggtgcagagggccagtgagagagaagggttaggaactggtgggtggatgggacaccactttactgagtttgggagaccgggaagaacagactcacaccctaggcagttcagtgttgatgcatcaagtttgagctgccaagggactcattaagtggagaactcaggcagatgggtgggtgggggtcaggaccccagggggagccttgtgggcttgagaaataacggtagagccctcaatagggccgggcttagtgttcagtggggtgggtcaaacatgcaaggaatgttgatgattccataaagagagggtatacatgatggatctgggtgtggaaaaaggccagaggagggaggcttcggagctcaggagcagggaccagccttaggagaaacttttctcttgagctttcagcacagacagggaggtgtggagctctggaggcaggaagtcatgcgagatagcttgtgatgatggcttctgattcatgaaaaaggatgtaagtcattcgttgaacttggggaataaacctgggtggttcaagaagaacggggagggaggtggtagagatgtgtcagcgtggggagccctgctgaggtgggtgactgccatgtggccaaggtcaccaagttgccaggtgcgtggtactctctgtggccctgcactgcttgccggcagtgtggaggagcgtgggcaggttgatccaccctgagttgactcctagttgggatttcagcagccaggctacataaggaaagagagggattctgtaatggagtgactggagaggaggaaagcaggctccaaggcaggaggtggggttgctgcaggtctctgggaagttggaaagtgggcagagaatcactgaaacacagtctgtgggacaggatggatgcctgtcaagtgtgtgtcctgtgctctggagggaggcgtcttctgcaggagggacgggagagccagctcactccagggcccgagctctagcattggcctcttacagcaccaccacccatccccccaccattttatggttttggttaccttttaaatgtcttaataaaagatgaaacgtatttattctccatagatcaataatttactatgagttatgacaatactaaatttggtcaattatttatcagctctaaagtatttataaatgctaccttaatttaaagcattagccattggaattcaaatattaataaagctgtttcccatttaaaggaagaaaggaagagtacagataatgagggtggctgggggcaggtgggtgctcgtggaggttaagattattggaggaacgaggtggctcgtggagcagccttgggggcggcagaggtgctggactcccttggggagagaccattccttctgggcaggcagggctgagcccgggtttgcccagagcctggctcttttttctgctgcccgtggagaggagctgagccttgctgggttcctctgaggttagggcatcaggttgtttctccccaggtggaggctctctcttgcctcatccatttggaaatgtcctgctgttctttaaggtggcacccaggggccagctaacacaggagctgccggttgagggggcttgggacctcagagttgcaggggctgcatgggcagatcttcttcctgggtgagcaagcctgcggagcgatgcctccagggcacctgacagagggaaaggctgagctggcagtggccagtgtcgtgactggggggtggcaccaggaaccgtgggtctcttctaacacatgccttctggggtattgcttcccacagccttgttctgagaatgttccagaaatccccacggggatggagaatagtgggcatggattagtgatggcgcctagagtgacctcaatgtctgagggcacctttctcacctccagcacccacctgcaggcacccagtgacttgatgagtcaaggatctgctttcaggggagacaggccttgttcctgcctgcctactccttccctggggcctgcactgagccgggaggtgccctggggatttctatccagggacagttgggtagagtcagcctggaatcctgggttctgtcccctgctggccactttctctttgcagcattggatgtagaggtgcctggtggtctggtgttctctttgctgtttgctctctggctgtgtggccctggccaagcaactagcactctctgtgctctgattttttttttttaaccagggaaatcagaaagctcacctggggtgagagttactgagagtttgttctgtgaagtggccagtacctcacctgacatgtcccacccctgagagtccgctgtctggaaaagcctggatgggtgggatgtgaacatcttctccagggaagcaggtgggaatgtgactgtggattgtgcagttgtattgcgaatgctgtctgggcaccccccacacccccaatgccgagctctgagtagccctttcttttgtggggaccctccactttcccaggacacagggtgcaggtgggggggctggaagccgctcattacagtttgtctttacttactttcccagctgatggatgggtcattctcagggggcccttatcagtccatcaagcctgtgttgtaatcaagagagacatcagctttgtgaccatataatatggaggcaaagaattataacaaaagctgttatcctctagagagctgtaaaaacatctttgagcatcatcctaggtagcgatgacttctgagttgctactatgtgccaggcagcatgaatggctgtccacatataaagacctttcatggcacacatggagcagccctgtgaagagggagccatcatctttatttgacccccccaagaagaaagaaagaaagacagaaagaaataaagagaaagccaaccagtaacccagagaggaccagccctcacccacagtcccagcttgtgaccagggcaggccccggactccggccaggtggccagtcccagtcctggggttcagcatctgtcacaacaaccagggcatgcattgtgtaacatcccatcacacacaaccttgattaagctaatagctgatttggctttgatctgatgtattttgatcttattatttttatgttagaagcctccaaataaccatcatttcaacagtgccccaattagcaggccattcacagtggattggaaattgactcacatcgggcctctccattagcgcctgggagaggcttccagccttaattacccaccctttttgtggaggcctggcgcttacaacgctgcaggtggctccacgaggggtgggccggcagtgctcacctccacggggagggcgagatggctcttgcctgtgactactagtacttaagatcctgggcatgactttggtggagagatgggatgtccaaggaaggggcaggaggctgacatctgttcagcatcttgtgcactgtgaggcattggcgcttgctatcagcgtcctaagtcagtgctctcgtagctctgctgggtagagattcttattcctatttaatagaaaatggaggctgagaaagggacatgcccatggctgtgtggctgctgaccggaggagccaaaactggaacttgggtgaatgaatgcttgagatccgaatgctcttcccaccacccctggtgaggtggtagctggtgagggttcagcccggctatatgtctttgtcactctgcacccaccttgtgctgctctcctgagaccctgaaaggttctaagtcccttccttcctttgaggccctggtgccaaccacaaatgaatttaccctcctctgtgtcccagggagcttcctttctctctcctccagttgagttgcagagtctgtctcctcagtggatcctaagctcctcaaagatgggacctgtggtcatcctgctcttccccctgacagtgcttagggcaggggctggcttgtggggtgtgggcagggataccaagtgtatgtatgagacaaggagggcaggagccagtggcatgcatgcccagatggggaaactgaggctcagagaggttctgccacttcagaacctgacatatatggagtggggacagatgatgacctgggagggagccaggcaggtggggcaacaagagccaaaagtgactgatggctgcaaggaggactctccgtgggagtcctgggatgggacaattccacaattgagcattggcgttcctggacaatttacgtcccagggatatacagtttattttatacaattgctgtttaagattataaatgtattgtattggcattaaagagagcatgcataagaaaaaatatccacgtattgtcatagtgccttagcttttagtgttttctcttgctgttttcatgggcgtgctttctgcctagctgtaatcatagttagcatataattttgtgccctggtattttcacgtgaccatctctcagaagcattttccccatgtctgtggcagtgttcgttgtgtggcctcacatctcattatctggaaaatggatgcaatgatacctactctacacaaatgtcctgagaatactgtgaattcacatgtacaaaggacgccaagagaatttggcacagaggcaattctcacacaatagtccttcctcctgtgtagttttcctgcttatccattatcagaggattatttttctttttaaaaggaattatctgtttatgtcacaaaattttggctaatatagaaaagaatgaaaaccactttcaggtttcttctaaattgcagtcacttttaacattttgcaatatttccttctggtttttctttcatgcatgttgatgttttatttaattgataaaataaaatacatacaattttgtatcactttcacctaccttttttatgacaggcactttcccatgttattgtagtatcttcttgactagtttaaaggctatatatactttcagaaaatggggcactttcataaccactcatctatttgcatcttttagatcattagcaatattccaagagtatggatagtgtcctctgaatggttttggattgagtgctgttcctacggtttggacaggtacccagagaggaattattgactggggccatggaaattcttgcatggtgttcttgcacgagtctttactgctattgtgaactgggcttagcctgtgtctgggaaaggatggtgaacacagcaggcatgacccttgtcctcctggagcctggggtcaagttggagagccagccagtaacacaggcaacatgtggctcatgacagggaagtgcagtgaagggggataatgccacaagggttatgagccagtctggggatgctgagtctgagttttgaagcaagagtgagcatcaggattgaagaggtgagtttgagggtccagggtgggcagttggttgggatgtagcagaaaagggtgtggtgaggagcatgaggctgcaggtatgggagcttgcaagaccaccctttcaggagtgggcttttactttatccctaggctcttggggggcacagcagggcacgcaatggatttctgtttaggagagaactcagcagactggagctggggtaggagggggccagggcatctgggggactgtgagattcacaagatctcatcatctcttgtttagctaccccctgccggtggccttgaagaggagagaaccgtaggatttgggttctcttcctgctggtgctcatgcaggtgcaaggcgagcgcccttgcatggagggcagccggtctttgctgctggagagtgtggggggaccctccccttcccacatgttcccctgcctcccactgccttgctccctggggtcagttcccccttttcttctctctctctcccagccttatctgaggcattacataaacccaagggctcttgaccaaaagaactgcattgtcaaaagttgttcaaagtctgctgtgtgcagcagatggcctgctgccattcacagcctgtgttttgaaactgcatctgcggccgggcgcggtggctcacgcctgtaatcccagcactttgggaggtcgagacgggcggatcacgaggtcaggagatcgagaccatcctggctaacacggtgaaactccgtctctactaaaaatacaaaaattagccgggcatggtggcacgtgcctgtagtcccagctacaggggaggctgaggcaggagaatggcgtgaacccgggaggcggagcttgcagtgagtcgagatcgcgccactgcactccagcctgggcgacagagcgaaactccgtctcaaaaaaaaaaaaaaaaaaaaagaaactgcatctgcttctccacatccttgccatcgcataaaccattagtaagagatgtttgcttcaaaactggtgcagtgggttgcagcgttgggaggtgcatctttctattaattggttgatgtcccaaaaaagtgtacgcacgtggctacaaggggcgcctcttgcagttacaggagaacttgtaaagatgagcccctgagcgtgtcagccctagaagcggctgctggagcgtccgctgtgttcctcctccacacccgtggtaactgcctgagtggcgggagcgtctttctttgttattgtcaagtggcttttgaataatccttctggaacaactgcttcatctggggtttggcccagtatttttgtgatatggatcacttggatttggccagaagacctagggtttcttttcttttttatttttttcctacatcttgggtcctcttgggtaagtacctctctgactttcagaagccatttagtcccttcagtcccaatcagttcagttcagtcaacagttgtagaacacacagtatattctctgcctgtggctaggcatgaggatgcacagatcaacacaatgacgttttggctcttaaagggcttatagtcctaggtgggaaacaggatggctaattttacagctcagtgggggtgaatcaggcagatttgggatggatctgtgctctaccatccttccctgactagcctagggcaaatggttttgcccgttttgacttctattttctcatgttaaatgggtacaagaatgtatagctggcattttcaccaaggatgtcagtgaggctgtgcttatgagagccactggcctgcccaggatggttcttggtcctggagggaggcagcctctcttgggagtcctgggcatgagctgccaggcatggggcctgcaggttgaagctggtgcagcatcgccctgatgctgaccccttcctctctctcttctctctttctagcctgtgacctcatgacccaggggattttggccttggtcacgtccactggctgtgcatctgccaatgccctgcagtccctcacggatgccatgcacatcccacacctctttgtccagcgcaacccgggagggtcgccacgcaccgcatgccacctgaaccccagccccgatggtgaggcctacacactggcttcgagaccacccgtccgcctcaatgatgtcatgctcaggctggtgacggagctgcgctggcagaagttcgtcatgttctacgacagcgagtatggtgagttgtccggcaggcgagctggggctgcttggggacagggatggccagatgctgggagacctgagagtgggtggggccctggaccggtcaggggtggtctgtgctgagtgggcctccaggtgatagggtcaaacctcgagcttcatgagtcaggaagagctgcaacaacagctccatagataggtataaagttgcctagcaacaacaccttatcatgacggctgaagtttgaatcatcttagaggtttcaataaaatattaataaactgctggcagggatccaaagggctgtatgctggcacagatggaggctggaaagcatggttcctcctggaggtctcctctccaaagagtgcccttcacactggacgattgcctggccttcctggctccttgcctccatccatcgcaatctgccttcagtttcagggttccaggctggggcaaaggtcaggggacggaatgccctgagtgtcatggagccaggctggggttgggggttgggaacactgggtagggctgggcatggcttctttgaagacctctcatatgaaaaaaaatcataatttgcttgttaggaaaccacaaaaatgggctttggagaaatggcttcaggttttcttatgactgctctgtaaaaacagactagtcttaatcctgagatagaatggtttccatgtttagtgtttaaacaatttttttgaaaattatgcgataatttagatttacatgcaattataaggagcaacctagggagatccagcgtgcccttcacccaggttcccccacagtaacatcctgcatagctgtagtacaatattgcaaccaggatttgatacagcctgtaggccttgttcatatttcagtagtgcacgtgttcttgcaggtgtggatttactgctatgcattttaaaaatcacatgtgtagattcctatgaccaccagtcaggatacagagcagttccttcacaaggatccctgtgctacctctttatagccacagccacctccataacatgttagagggtgtgggagactgatgagggttggcagccccacggctggtgccaggatggaatgggtggaccttcaaaagtcccattttgtctctgggtgatataatttctttgccaagaatgtaactaagaaaagaaatcagcatatgtttgcatttgcctaaatactcttcttctctaagactggaatgttgtcctcagctcttgagcaaatatgctgtttggagtcttccaggaagaattgaaagagcaaacagtcactgtgctgaaataaagatgaggtggatggggacaagggcaggacctgaactggactcagtccaggacctggcctctccctcccaccctcccactcctgctcagtccctggcccttggtgaggagttggagattttgtaacagccccgagctgcctgcagggatctcttaggggccaggccttccccgagaacccttggggctggtggctcaaccccaaagtccagcctgctctgaggctgaaccctgtggagaggcatggacactgccagggatgggggtgctgtggtccagtgtgcccaggcccttcccatctcactttctctgggcaccattgctctgtttccaatctggcctgcagacacagttttcccctagagcctgggaggcgaccttgatgggagcctcagccgctgggagggcaggtgatcagctctctagcctgcccacccgcctgggctcctgtgactcctgcagactgaacaaggcctggtggcacttgcccaagtcctgttttcttattaccctccttaccctcactcttctcaagatgcaggtcctcaaagaaaggtgtccctgagccccacctgtcctacagagctggcagcttggttacacgctctcgcagacatgctcgtcctgccctcagcctgctcttggcttgtcctgactctcatgagggctagtcctccatgagtgctggactgcctggtgatgcagtgaagtccgggagagtggctgtgtgcttcccaccaccatggccctgcagcctgcatggtgcctggcatagagtagcccctcgacacattcatggatggggacatggagttttcaagccattttcacacaaaacaaaggaggaatggggagaaggacaagggtactggatggtctgacctctgactatgaggtagcagggaaggggtgtaggctaggaaacaggttgtattctacagtcacactcccccacccctcttctttcctccacccagaatctccaatgtgatcaaaagctgtgttcctcttttctgacatggacacctttgctacctttggtggggttgaagttagtttccaaccagactgctccttatcagtaattccataaagtcgccaagtgaccagtagctttcatctggaggaccactgcagctggttggttgaggctgcttgggagctgtgctgggaaggattctgaggccgtgtgtgggctcagcagcagaaaacaccatgatcagtctgtgaggcttccatggtgcaagagagggattggcagagacctgtcatgtttgctggttcagacctggagggtggaggtgagcggagaaccccagagctggggttctcagtcagaagacagcgtcagagtggtgtgctcatggcgctgtccagggtgctagcccttctggctctcggcttgctggaggccagagaactcttttattggattctgtgcaggacctcctgcctttgcctgccctggtcatcggcctcctgatatgacaagcattgaggcttggtttctgcctctacacattttctgtaaaattttaacccggtgcccagtgctcgtcctggctttcccctcatgcccagcccagctgctgcccatttccaacatgcttgtgtcaagtgagccaaggcagctcagcctatctgctgtttgatgcagcacatccagccctcggagtgcaagtgtggctgctccctcggcatggctggctgtggcctgtcccagtgtcactcctaggtggatacacattgctaatacagccaagacaaacggtgcctctggaacacctcagggcccctcctcccactgactcactgtagcactagctgcagatgagcacaattcaaaagcaaattaagtgtaaagactattctgttctttccaaagtcaaacagaagtggtttggaaatatagcaactttttttcaatgctgatctgcaagtacctttatgtattttacttcattctagccacccaacatccctctgaggtcagattattgctacattttacagatgaggaaaatgaggctcagaaaggttcttcctgactttagtacccatgcatttagccaaggcatcatcctatttctgtaatttggacttactaggctctagcttcctgctcctgtccccagccagtcagagttgatgccaagaaagagggaggtagtttggaaggacatggcatgctctaggctgatgcagtcactttagtgagcatcatacataggctccctcctttgtggggcaaggcctgattcttcctcatttgcccatcagcctccctttaaaccctggaatgtcctgccccaggtagagcctgaggactgggcatttgagccaggagttagaaatcagagcaggaaaagccatgggctccaagacagaatttggcagaagggtgagagaggagttggtatgtatatggtttacaagatgtgctatttggtaaaattccactgaaaatacttgtatgcttgttatgacagtgaaaggaaaaataaaagagaagacgacatttgagagagaaaatttgcaacattaaaataccaaaagtttggatcgaaaagaatggagaactttctgacttgccacttcaaatgctgggatattcatgtgtgtatgcattggcaggggccgaggtgggaggggggtgctagtagctgtatccacaatttccctctagtgaataaatttggatgaaggttgtaattatgatgagctcttagatatcattgactccttcattcaaaaaatattcacggaatccctaccgcatgccaggtattttgctaggcactcattttcagtgaagacacagatgggtggagtaacttggctaatgttgcatgggctggcattggaagttaggccccaggggcccaggggcatctccagggcacggcagtcctttcttggtctctgggctagctcgcagacctgggatgggttgggagctgggattccacagaaacaaaacatcagggctctgtttgagtggccactgtctatttgtgctagtttaaaaattattttttaattgaaagctacacatggttacgatgtatatgtttaattaaaagattaataacctgaagactcatgaacccacaatcagtttgaaaaatatcaaggagcccttgtgtgcttcacctgaccatgtctcccctacagagggacttaaacactctcccgattgtgtgctaacaagaccctcgctttccttgatagtttttttttctttttatgtgtctgaagttttgccaagttgtatctaagcatggaaattttaaatttatgcctcatatatttaaaacactgtacatgtatttcactgttttagaggatcccaagccagtgtcttttttttttttttaacttttattttaggcttagtggtacaagtgcaagtttgttacataggtaaactcatgtcatgggagtttgttgtatacattatttcatcaccaagacagtaagcctagtacccattcgttgtttttcttgatcctctctctcctcctaccctccactctccaccctcccataggccccagtgtgtgttgttgccctctgtgtgtccatgggttctcatcatttagttcccacttataagtgagaacatgctatatttggttttctgttcctgtgttagttggctcaggatagtggcttgcagctccattccttgatagttttatcatacaagtatgggacccatggttggtttgcgactcatatatgtggaataacacttctgcatgcttctgagattgttttttaattttcactcagcattaggtttttgagattgatccgtttgatgcaggtggatgtattaatcatttttattgctgcactgtgtgccctgatttatttatctactttattgtctgtgggcatttgtgttgtttccaggattttgttattaccaaaaatactgataggaacattctcatatttgtcttttggtgtttgtgtgcaagagcttttcagggtctattctgaggagcagaattgctggactcttgggtcagtgcacatttcactttattaggttagaccaaactgttttccaaagcattcctacctattcacactaccatgtgcaatatatgagatttccccaagtcccctaacctcaccaacacttgtcttcttgttacttttaggtttctagtgtaaaatgtaattttattttgattttaatgtacattttcttgatgatagatgaggttgggtatcttttcacatctttatgggctatttttattttcttttttgtgaaacacctgtttgtagttgatttttttgcctgtttttaaaatcgagccttttctttttaagtgtggcaatatcttctttaagttaattgtttgtcttagtgaacagaaattctttattgtattgttgtcaaatgtagtcatctttttttatggctagctcttttgcttgtcttgtttaagaagtcctttcctacctgaatgtcagaaagaaattttcctgctgaaacctccctctctatatggagggcagatattgtccacctggctaggtgtccacagctatggcctggccaggctgtgcctgccctcccctgcccctctgcgagcctagcaagcctacctctctcagcatctgtgggctgatattccttccaccctgacactgctccactttgccatgcctttgggccagtcttttccttggtggcaactgaagaaagctcatgcaaattcagtgcagcctatggcaaggtggttaggaagagcttcctggaggaggtgacatttaagcaggtgcttaaataagagtagtttttactttttattaggcaagcaaagggcactgggggctggaggtgacatttaaacaggtgcttaaataggagtagtttttattttttgttaggcaagcaaagggcactgagggctgtaggaagagtgttctaagcagagggaagaacttgcttccctctttccagaggaaaggtctgggggcaatggagaggaggaaaaatcatatggctggaatatgggaattggctagggataagactggagagacagtcggaggaggccttagatgctcaggatccccagaaatctctgggagccatatcttgctacctcgggtggcactcttgggtcctgttctttataccccatccagagatttgaagacagacaaaggcaaagccttcatctctagaaggctctggtcctttcactgcgtcctgtctgaagtcattctctgcaaacaaaagggcagaaactgacacattctcaggaatgttgatccgagttaggacaaaccacagtcccagagtctaagctagaggtaggacccgaatttcccagatgacccaggcgtcatgccagcgggtaacagctccaagtccctctagcccttgcttcatgctgggtgccctgaaagagcgtggagctgcccttgctcacatcatcccaatggcaaccccacatggtgggttctgtactcagagaagtaaagggatttgctctaggccatatggctggagagttgggggctggccagctctggttcccaaagggtccacagctctgttcacagcctcttggcaaagctgtggggagcaaacaccgtggtagagtctttgcttgatgtacaaagatttattgtggcatttttgatgacatcagaaattagcaacaacctaaaggtccatcttcagcaaattggttaaatatattatgatatttacatgtaatggaaaactctagttccttatgtactgagtggaagtagttccaaaacatggtgctgttagctgacaatagagaagtgagaatggtgatgtgggtgttgctttgtgtacaagtgagcttctatgtgtgtgtatctgagtggacacacatggtcactccaaggaaatgctgtttaaggaaaggaaacacagtgggttggactgggatgggagatgaatttttcactgcataacttcttgtactttttgagttttgcatcaagtgcaaaaaataaatgagtaaataaaaaagtaagcatggatcgccattcctctctgcctcctgcttcctgtgcaaggtgacttctctgagcttcagcctcttcatctatagggtaatttctgagctgtaagggcaaaacactagtagagtgcctggcacatggtaagtggtctatatgatcacaacaaaccatgcatggggaccaagagtggtaggaaccaacattcttccctcatggcagtgcgtgtgggcactaggcaaccttggtagaatcttggtgcaagagatttggcagtttgctcctccagtcaggctcaggataacctttgcgtttaatagttaggggcatgggctccagagcagtcttcttgttgaatcccagctccgctgccatatctgtgtgacattgggcaagttactcaacctctctgtgcaacagttttttcatttgtaaaattgcgatacaatactactttctgcctgatggggttaacgtgtggattaaatgagccaatagatgtcaggggcttagctcagtacctggcgcgtggtaactgctcagtaacacttactactctggagctgtgcccagcagtggtcccattgctgtccattcttccttggcttcccaaggcagacctggtgaatcccagtcctggcttgttcagcagcccagaacacagctgtattttggttgtgttcttggtgcttggggaaacagagagagcttgggggtcagctctttcacctgcaggttacacaccttgccctatggaggagctgagctgccaaggcttccccaaggtctccttgcacagtcacaggtggctccgaagagccatcatgccttctaagctggacagcttaactggttttcatagaaaatatctgtcgggatctcacccccagagtcttcctgaagtaaaattccgtggaagaaagggaattatcggggcaaatgttactttaatcaatgccccttgctgacgtctcctttgcggcccctggcaaagcaggccagatgactgaactgccatgctgatctcattaataatacacattggatcattatggcattagtttaaattgaagtaatacatactttttccagacaaaatgagtaagtgagtttaattgctaggaaacctatggaagaagtttgacaataactttacctggatgagtgttttgggttttgttcttcgatctaattacaaagtaactgtactttggggtgtgttaattgcagtgtgccctagaagattaaagtttattaactctgaagttccctcacccctccatcagattccagagtgcgtctggagacatgaggagatgcctgatgcaggcctgcataaaggactggaaagtgaggctatgctgactcccacacatgccccggtgtgctgctgggtcctgctggagttgagggagcaagaacttgtccagatcgtcccccgtttcctcttctcaccacacaccattgtgcccttgcaggaccgatgcgggctcctgttgatatccccctcctgccagacccacactccccagacctcctttgctccacacatgagagggaacaagggagatgttgtgttgttaaatactagaattccaggaagggtaccagcgagatgtggctgcagacttctggaaggaccactagtccagatgggacctcccctcctcctgctccctgtctgctgccttccagctccggctccttgctgctccatgagcgtgcccggcacaacctgctgcagaggctttgggctggctgtttcctctgcctgggacactcttcctgcacgtgcagacgtctgcaagctgcaccttcggggctttgcttcaattccatctgtcccgtggggccttccctttccaatttatttaaaaatggaactctattttctcttggcacctctttctccctttttccattgaatttattcccatttactcatcttttgatgtctgtctttccccaactagttccatgcagacaggcagttttgtttgcttggttgagtgatactggacccacagcatttagaacagcacctaaagcttagtaggtgctcattaaatatttgatgagtgaatgagtgaattgatattttgggggtgtttcattgcccatttattggcccagaagcatttgtttctttccttgagtttaccaattacagcagtaatatatgcttcctatggagtccaagtatgtgcaaaggcaaagcccctccctcctccactttcagtagagcactggcttgttcagcctgctgtgtttctgtctataccttcctccttgtcaagtgtgtagactgcctgtgtatgccaggggtcaggactggaatgtagtttagatgtggccagcccctgagaaagttcttcccatagcttcaagtcaagaatgactacaaaacacatatgaatcacagtgagatggcaatggtgctgctgaggtctggtgggtgagcctggcttgtgttggaagacttagttctcttcctggctttatctttttctaacgtgcttctgggcacactggcaactctttctgatcctttgttttcccactttagtagtggggataataaaaacgcctacagtggagggttcctgtgaggctgaaatgaaatgaaatgaagtgatggatttgagagtgattgcactccctgaggtcccagaccatttctcgtttttcttactcctccgcagtacccaggacaatgctgggtacaaggcctgtgattgagccaagcgctgaacaaactgtgctaggagccctgaagcctagagccccaactctgtcccgggaagcagtgggttttgaattacagctgggagcaagagggcttctgcagatggaggaaacctgtgactaaaatgccagggtgtgaatggcatggcatatttgagagggaggagggatggagggtcagcagcttatgggaaaggatgaaggggtccatggaagggaagctgtgctagcggtctcagaggccaggttgtcgtgtctgtcatagggttttcctcttctgatgtgaggcatgtgctgtgacgtcgaggcttgtcctctgtgtgaactttctcctgtgtagtaaggatgctcaagaacggaagcccgttctctctggttgcattgctctggaatgttaaaaggatgaaattgcctgtatcttgtgtgactagttctggactgcaggaagcctggtggttttgatccaggtggcagctgcctgccccgtattttctgtggaaggctctgggagtggtgacaaggccacttagaaccaaaaggtgggggtcacgcccagacacagccatgtgggtaacattatgtctcctctcagcccttcacgtacccagttccttgctggaagttatcctcttacccacctgatggcgtggtcgccgcgggggcttgtttgctgccaacccccagccagggtaggaggctgcacatgaacctggcacgctgcctctgatttttggtttgattgtttcaggttgcattgtctgcctgtttgcttatttgtttatttccttcacacatccagagagaatttgcagaggcttctaatgtcttcttagagagacactgaggttaagaaagcaactgcattagaaaatcaagaggtgccaaggacggctgtggtcatgctattctggcagccacaggttacagggtgggaggaagcagagggaccaggcccccctcagcactgcaaagaatcctccctgagggacctgatctctacaggagaccatgaaggacagaatggatggcaattccagctcaacctttacagcaaatgtagaagtgggttttgcttggctgtttctcagtcaagcacagtcgctgactgtgcagtgtggccctctcatggctcagctgatcccaagctggaacttaccattcctggaagggtagggataggacttgcctctgcctaagcttcctctgggccagacttgaagcgggtcatagcaagggttgtgcgttctggcactccttgctgcccacggagtgaggcttcatgtgtccattcagtttagttctgttggacaaatgtccaccaaaggcctttgcagtcccaggtgctgggtggggctcaggaggagagcaaggcaggcatggtccctgccctgacaggaactgctgtaagtgggacaaggggtgtgaggggggctgtgcagtgctcaccatagagccgtagcagagctgggggaggccttcataagcattggtggccgagtgcagtcctgttggggtgaggagggctgagcagagaccagcccaatgtgaggggttccagcagggcagaggggctgccttgtgttctaaggggagtgggaagatgtggaaggggagaccaccctgctttgggatttttgctttgaaattatttgtatcatatacataagtcatacacaaaatgaatatactcttgttgaaaaaattaaaacaacatacacatttaaaacacaaagcaagcacccattaggcacgtgttctccctctcccacctatctgccttcctctcttgaggtgagtaaaggccttgcctggacatgccacatgtgcacacagatacagtgctttgcagacgcagaaggggaaccatgccccgggcattgtttggtgacatgcttttacttgatgggctttgcagcttttgctccatattgcccacttggttctaccccattctttttgcctgttgcacaacattctgcagagtgggctttattcctccatgtcttgattcaggtggcttctagttcttggccgtcacacagggctgtagtgcgcagccgtggatacatcctcatgcatgtatctctaagtacttctaggggttggattgctagaaagcagagcggctgggctgcaggagattctgttttcaaattaggaagctagaatacagtgatgagatgccagttaccaaaataaggcagagaaaggagaagtgttctggaggagaacagaccttgttctggcccctgttgtttccattcttgggtgccatcttgctgagaagtgtgattgggcagaaagtcagggacaaaatccaaaatcagagaaccagataaaatgcagcaagggcccacttaggtcggcagcagctcttgtgagaagcgatttgaggattgaattatctgcagcttggtgggagtgagcggtagtgggagtgagcagtggaagggagggagggaggtggtgagggctgggtggtccctttggtgtatcctgcactgagggacatgcctctctggtggaatggagacaagctggcaggaattcagaaaggagggattctgaggtctctgacaggcctggagctgggggatgggctgatgtgagctgaggggtcccaggaatgggactaatgaggaaatggtgcagagaatagggtgcagtatgtcaaggaactttccaactgtcagagttgacctgagctggaaggggctgcctctgtcccccagggacccaccctgggtactatggcaggaaggttcttagctctggtgtgcccacaagcccctggatgattggccatcatgagatagaggttctccctagagaccctggcatggtttcctcaggcctagaggcccaccaaaggccacgtggttgagctttgctaatggatcataaagagaataacgtgccttgcgttgcttctcctaaaggaagggaatcaaacattcactgtgtagttactctgtgccaggcacacaaccacagttcctgtattggtctttatagtaactcaacaaggtaggcatctgccaccaggtcacataaggagcaggctggggggaccccagctgcaggtggcgattcagatctcaagccctcactctcctgactgcaccccaaccaccctgagctacaggtgagtgcgttctggataccatgccctgggaatgaggagagagtggagggtgcaggtagggtgagctcctgaggccccaagttaggagatgctgaggctggatggggctaagggaactgggaggcattttttcattgcctcaccttctcttctgtcttccttgcttcccatcctcccgggctctcctgagacacacgctctggcctctcacacattctgtttgcagagggacccacacacagtggagccttaggcctgggactcaggctctgggaggctgcatcctcactgtggggcctttaaggattttgttgctggagacccctgtggttctgtggaatcaccacatatatcggtgtgaacatcacctgttggccctggtcctgtgtgctggattctacctgtgctctgggaagttcctactttacttttgtagttttttgttttattgtggaaaaatatatatacaacacaaaatttaccatgttaaccattttcacgcacagttcaatggtgttaagtacagtcatattgcagtcactaccgttcatctccagaaggttctcatcttcccaaaccgaaactctgtactcattcaacaaagacccccatctcccccctcccttcagccctcagcacccactgttctccttcctgtctcttgactttgactattctaggggcctcatataagtggactcgtaccgtatttgttccttgagactggcttatttcacttagcatagtgctttctactttcctccacactgtggcatgcatcagaacgtccttcctttttcaggctgagtaatattccattgtgtggatagacagaattttattgacctattcatccatcgatggacacttaagggttgcttctacctttggtccacttggctttctgagggtgttgggagaggaatgtcgtctcttggagcctccatgtgtgtgtgtgtgcgcaggtgtctgtgggtgtgtgttgctgcaatgggattgtatgtgtttgtgtgtggtgggcatttttgtgccacactgtttggaagacatccattcatccttcattctgccaccaaagtcaccttccttaactcactgccctgcttagacccctgaatgtctccccttctccttaaggatcaagttcagatcccttctcgcagtgcacagggcctccaaggtctgtctctccctggcctttctctcatcactccctcaagacctccgtgtcccagcgacgcaggatggatcagcaggggtgccatcaggaacacatggcccactccaggtcattcagaggaggggatttaacatgaggaactactgacaagtgttggcagagttgaggacaggtggagtggaagcagcccagactaacaactgggcagggctggagtgactcccagggctcgagggatgaatgggagagatggtcctggagccatgactgtccagtgggtactgggacctcatagaggggccaccctgagggaactgggagcatgtgggagacccaaccatggccagagacactggaagcagagagagggtgaaatacctggcttcctcctcctcctgtgcctgagtctcctgaccatgcttctcagtggtcagtggtaatcagcaggatagggagtctgggaaggggaggggtgggcactctagagggaagaacaggggagggtgggggatggatgtgactgcaatctgcactccccaccacacccagggactcaccttcctgaatgtgtcccagtcacaccccaccatcccacatggctccccgacctggaccagccacctcactgcctgaaagctattcctccatcctcaagacttatttgagcgtctccttgttttggaagtttcctctcttctccttgttcccctgccaggtgggctgtcccttctctgggttccacagatgccctctgtgcatctcaccccaggttactgggccataattactgacttccttttctccctccctctggacagtaagctcctccagggtgaaaagcctgctttacctgactttgagtctgtggcatcaaatgcatgtaacaggcctgagcagatgcttattgtgcgattcagcaactaggttagaggtgacagaaataaaaagcccagagatctggagctctctttctcacacacacaatatgtgcatgtgtgttcacacaggcacatgcatttgagcacacacagatgcacatgtgcatgcaggtacacactcatgcatgcatgcacgtacacactcatgcatgcatgcacgactatgcacacatgtgcacatagacacatgcatgtgaacacccacacatctgaagtgcctgtagtcattaaagttagaggtgcagatgaatgtggtctgaggctagctatgaatcttactaacagtcaccaagaaagatcaatacattaactcttttcttctaagttggcatgaggtttcactggagggcctcggcagctcaaggtgaagttcttcctgaggccttccttctagcctggcttgtgcagggaagggagagccaggtgagctccaggggccctgcacacctgcaggatggggatgggcatgtcaggggtgcctttggttcatctgggacctaaccaggtcttggctactgccactgcagtcagaggacctggctacagagccaggctgtagccatggggcactgcccagcccctccctgacaccagcacagccaggcttcatgggcccccacacctgttgtggggcccaggggcagcaaagggaggaggtatgtggggtgcactggagcctgtgcacaggggctcgtgtgagccactgggccacctcttcccaactctgtgtttggtcacagcacttcagtgactagaaatcagtcccggtgggaatatttacttcatggaggccagtaagtgccacatgtcagagcttcttattctggagggccggttaggatcacaccatgtgtcccactcacatagtgtttgtgacctgcttgggggtgggcgactagatggtgacacagaggatattcaaggtaacggtgtgttttgaagggaaggcaggagcctggggccgagtcacggaaggcatgcggtggacttgcactgggttttggaaggcagggagggcttgggcagagggagacagaggtcccaggaggtaacagcctgagcacagagaagcacgagggtcagagagtggggtgttagcaaggagggttaggtgagttttcaggcaaaagagaagggcctggaaagccatgttaggagttgacctttgtccttgcagggcaggggttcttagtgggcacaagagcctcctcccacctctggccccggggacatttggcagcgtctggggacatttgtgtttctctgtcataacaggggatagggaggagtactagtggcctcagtgggtagaggccagggatgctgataaacatcgcacagcacccgcttaagacagcccctgacagtaaagaactttctggcctcaagtgtcaatagtaggtaacagggcataggtaatagggagctattgcaggttcatggtcagggatctataaagttgtgtttttagtgcagtttgtggaatagagtggaaatgtgtgcatgtgatgtgtgtgtgtgtgcatgtgtgtgtgtgtgtagagggtagggatgctggggaaaaggagaccacaggcaggggagtaatgaggaggctgtgtcaggacttctgggatggtgatgagggcttactgggggtggtagcagtgagaccacagcatagaagacacatggggccactttgtagcaggaagtgacgggagttggaagccgactagttaggccaggtggagtgggaaggttgacatcagaagttccccaaaggtcccatcactagcctaggaggccaggggttccatcataccaaagaacacgagagagttgaaaggaatgacagtgagtctggtttgagtcctggattccagggtcacataatatctgagctgcagacatgacccccacttttagagaaggggagtagagctttgaaagtgccagcaggtgcctgtgggtgttgagatgcaggaaaccagagggaagtggctttggatggtggaaaatgggtgtttcacaaatctgcctgcttcttcactggtgtggatcaggagagccctgggcctggcggagtggggcttcagccacagatctccctgtgtcagacacttggttcccgctgtggctccttgtggttagaattccagaactgggctcaacttatgctctgccacttgtctagttggaccactctgaccttctttgcatcttcatctatcaagcagagataacactggcaccatccccatagcttagatagtggattaaatgggattactgatgtgcctagcacatttggggttctgttttggttattctttaataggggatgttggcagtggtgggtgatggatgatgagaagaatagatatgtgtcctgtagccccagggcagccctgccaacctgctcaggccccgagagagagggaggtgctgtaaatgcttgtccccacccctcccagccctctggcattcttcctgtatgccttgggcacagaggcttctctattcctcagggagtgggtcttggcaaaggaacctgtttctaggcttagacagcgggctggcagggggatggggtagcttggcagaatggaaggtatggacaggacaggcctagcaagggctgctctcctggtgggctgcagctcccattttccctctggcctggtttgttggggaatgagctggtccctgaagggagcagagcctgagcccttgttggcatggggatggcatcagcatagctgaacgggcattctagccatgcagggactcagccttgtgctaggggaaaagtggggtttagatctatgcagcttttctgcttattttctaggcacctttgaattaacttatctttccatctgtgcaatgaagaactagtgcccaacttgctgcagtccatgtaggagccatacacgctcacgcctctattcacttcaccatgtgtgtcactcatcagtactaactgaggatctgcgctataaggggctgcagaggatggacagggcagggcagggcaaaggcctggagtcctcctggagtcttcacccagcccttccatcacccaccaatgggcttttggtgggtctcttccttcaagacttatttcccttccatcaattaggacagggctgggggtggtccctgtgactctgacatctctagttgtgtgtcttatgtagcaactgtgaagttaaagctccttaggagatgggtggtgggaacttctccttgaattattcctcccatgtagctgccttatggaaatgagccgataatggccaattccatgtgcaaatcagctctgggctcagctcagcctgagcaggcgtgatgcctcttgcactataaatacctcccctggaactagcgcagccccaagagtagccccagtgcttctcagcttgcacagatgccaagaacattacctgttcttcctggggctccccagcctctggctgctcctgggaatctcacatttcctggtctcgttcagtgctgggtcccttagggatattcgttaattctcataaaaccctgggaggatagtgtaattagcagcactggatgatgatttagcactcagactctggtgcagactgtctgagttcaaatcctgcctccagcctttctaggtagcatgaacttgggtgaggtactcaatgtctccatgtctcaggttgcctgtaggcgtctacatcatagccttcttgtaaggtatagagagctggcaccagaataacactcagtgcctgtctcatagaaagtgcttatcagatgcttgatattattatcaacccaattttaccaatgaggaaatggagactcagggaggtgaagtaatttttctgaggtcgcagagacagcaagtggcaaaagaggtctgagccccgccccgcccccaatgaccatacttttcctaccacaacccacctggatctctgtcctctggggatggtcaaatgataaggtaaaagctaaaagggatttggggctgcctttccttggctcttctctgggatgtccaccaaggcactgagtgtcatagaaaacctggtttccccagcttaaacctctaaagctagtccagaggaacagttgcttctgcctgggagttagtctctctacctcagtttgcttctctctaaatgaatagatcagatctgctggactctcttgtggctgcattgatctctgtgttttgtggctatggtgtgcttcttatgtgctctggggttgtcacccaaggaagtgatgaagtggttgcttgtcatggggacaggaaagaagaagcatttgaataatcactgcatgccagcattgagtttagtgtttaaaaaaaactggccccatggagttttcgtaacacctctgtaagttaggtacttttggccccattttccagatgggaaaactgaggttcaggcaggctattgaacttgattaaggtcacccatcaagaaagacaaacactggtggctatgaagcttgaagccccattgtcccttagagaagcagaaagtcctcaaattacttgagcttccacctaggaagctaggaaaaaagagcaaatcaaatccaatataagtaaaagaaagaataaatgaagattagagtggaaaatgatgaagtggaaatcagaaaaacagtagagaaaataaatgaaacaaaaagtggtttttcatgaagataaaattgataaacctctgaacagactgactgggaaaacacaagagagaagacacaaattaccaacttcagaaatgagaaaggtgacatcactatagatgtgagaggcattaaacaatcataagggaatgttttgaaaaaccttatgccaacacatttgacaactaagctgaaatagacaaattccttgaaagacacaaattactaaagcatactccagaagaaacagaaagcctgaatggtcatatactgattaaagaaattgaatttctagtttaaaaacctcagagaaagaaaactccagacgcagatagcttcactgttaattctgccaaatatttaagagagaaatattaccaatttatgccaatttatccagaaaactgaagagaatacttccaaacttatactattagatcagtgttatcctggtactaaaactgaccaaaacgtgacaagcaaattaaactgatgtccttcataagaacttcaacaaaagattagtaacaatatataaacagaatacttcattgtgagcaagcagggcctagtccagtaatacaaggctgatttaacattcaaaaatcaagtgacgtaattcaccattattatagacttaaaaagaaaacacgtatgattatgttgtagcatttgatgaaatccaacattcagttatgttaaaactctcagcaaactggggatataaggtaactttcttaacttcataaagggaatttataaacaatccatgaggaacatcatacttaatagtgaaagactatatgcttgtcccttaagatcaggagcaagacaggatatttactctcactgtatctattcagtgctgtagctgaggttttagccagaaaattaggcaagaaaaagaaacaaagatgcccagattggaaagaaaaaaatgaaaactttaaatttactgattatatgatcatccatgtgcaaaatttagtgggatctacagaaaaatactagaattaacaagtgagtttagcaacattgcagtctaaaaaatatacaaaaatccattgtatctacatactagcaatgaacaattgaaatcaaaataaagaagaatactatttacaatagcatacaaaatgggaattatttagggataaatctgacaaaaatcagcaagatctgtacactgaaaactacaaaacactgctgagaaaaattgaagaagatcaagataaatggagagacatactgtgttcatggattggaagactcattactgttaaaaatattagttctccccaaattaatctatagattcaatgtaatcccaatagaaatctcagcatgcttcttctttttggtagaaattgctaattgtaaaatttgtatggaaatgtaaagtacctagaatggtcaaaacaactttgaaaaggaagaataaacttggaggactaacacaacatgacttcaatttcgatttcactacatgactacaagatttcaattgtccattgctagtttatagatacaatggatttttgtatattgatgtttctatactgcagtgtttctaaactcacttggtaatgctagtagcttttttgtagattccattgagttttgtacatagatcatcatatgatcagtaaactaaaagttttagtttttcaaagttatagcttcaaaacattaaaaagctacaataatcaatacagtgtgtttttgtgtgaacatagagagatagatcactggaagaggagagacaatccaaaaatggacccccacttatatggacaaatgatttcaacagggttgcaaaggcaattcagtgaagaaagaataaatagtcttttaaacaaatggtgctggaacaattaactttctgtatgcaaaaaaaaaaaaaaaaagaaaaaagaaatatactacaatcaccttgcctgtatgtaaaaataagtcaaaatactttacagacacaagaataaaccttaaaaatataaaactactaggagaaaacacagtggaaaatcattgtgaccctaggttaggcaaagatttcttagatgtaacagtaaaagcacaatccataaaataaaaaaatttatcagccagattttattaaaattaagaacttgcactctttgaaagattctgtgaagaggataaaaagccaaaactgaggagaaatatttatgaatcacatagctgataaagaaatcatgtatagagtataaaaactcttaaaactcagtaataataaacagcacagtgagaattgggcaaaatatttgaatagacactttaccaaagaggatacgtggatgacaagcacatggagaaatgctaattattgattaggaaaatgcaagttaaagccacagaacatgctatttcatagcagtgattagaatggctaaaattaaagatgattgactataccaagcatcaggaagtttatgaggcaactggaattctcatttactgctgctgggaataatgtaaaatgcactaccagtttggcaaactgtttggcggtttcttaaaaagctaaacatacacctatcatatcagtcattctactcccaggtatttacttgaaagaaatgaaggcacaagtccacatgaagatttcagtagcagcttaattcataatagccccaaactgaaaacaaccaaaatgtccattggcaagtgaatgaattaaaacattttgggctgggcgtggtggctcacgcctgtaatcccagcactttgggaggctgaggcaggtggatcacttgaggtcaggagtttgagaccagcctgaccaacatgatgaaaccctgtctctactaaaaagacaaaatcagcggggtatggtggcgcatgcctgtaatcctagctacttgggaggctgaggcagatgaatcgcttgaatctgggaggcagtggatgcagtgagctgagatcatgccattgcacttcggcctgggcaacaagagtgaaactctatctcaataaataaataaataaataaataaataattgtggtatatttatatgataaaatactactcagcaataaaatggaatcaattattggtacaagcaacaacatggatgaatttcaaaataattaggctgggtgaaaaaagacaaaaagagtatatactatgtgattacatttatacaaaactagaacatagaaactaatctacagtgacagattgcagatcagtggttgcctggggactggggtgggggatagggaaagaaagaccgcaaagaagcacaagaaaatttggggagtatgttcagtatcctgattgtgtgatgcatgtgtcaaaaatgcattaaaaatttacattttaatacatgcagtttattgtatgttgcacattattacctcaataaagctgttgaacaaattccgttgccttttcctgataccatgctgcccgtcacaggggttctttgtccatgccaaagaaaccatcactcctgaattcattcaaataatcgcatatcccttatggtctgcaaagacttgttagtttgagaatccatctgtgtaacatctaccacataagcaagcggtgctgacttgctggaattcctgtcacacacgagagagaaagggtggagcagtcaggattatattatagcagggacccgaaatgcaatgagcagtttcaacgaatagtccttgaaatgtatgacaaaggaagctaagtgcattgcaatctagaagctgacatcacagtttttatctccatgttataattttcttcctttatcaccagtctgcattaaggtttattagtacatctctggcctgctcagaagccatcaggtggggacagattagtgtgtcggttatggaacagtggtaggcagaagccgatcagatgaactcagacagcacggtaattagcatgcccgagacaccaggctgccgtgctggggcggccttggccagtctcactgtggagcagtttgttcctttccacaaagaaattcattagtggcgatcaatggcatgcagtgtggaggctcccccactgatgcctggagtctccgtggcccggagtcgccccctgcttggggccgggagagaggtatccatgccagctctctggctgctcaccagggccactgggcagcccctcagggttaggctacggggaagcacccgcagaccctggaattctgcatgcagccatggtctcaccccatagtctcaatggaagggcgagcacacagctctaaggctgtctgcacccacggagactgatgtggaattgatgcaggggtcgagtgcggagtctgaagtcattaagctcttaaagaagcccacttcactttttgttgtttgctccatgccagcaaattctaagtactgcaacactaagttgtaaattcatgtattcgtccaatgagtatttattgtgtaccttttgcatgctaggttctggggattcatggagaatgagggggtcaacgttcctgccctcattgagctatagcctggcataggagacagagaataaataactaagaaagccaacaagataagtaccactgagtaattaagaaaacttgttattatgtaatgtcctggatacaacatgactctcttaatcagaggttcttcccctgggctcatagaccccataagctccttgaaatagttatggaaaagtatgtgtgtgtctgtgtttctgtttttttctctagggaaagtccatacttttcaccatatgcctaaagtgtctatacttcaaggaagggtggacagatgactctagttcacccctcaggtgtccatgggcacaggcattctttcctaatcctttcctggacccactgtgactgtctcctccttgtttctctaaatcactcccagagaagtctgttcccatgtactagcggggctgggagctgttgcttccctctctgggttcatgttagtgtccactggaagaggcaacctacctgcattcaatcagcattgctctgcacctctgagaacaagcactccatttcccaggggagagccaggtcctgggggccacagcttcaggggcagctggatgggagaccatgcagccctgcaccgccagcctgatctcctggatttgtaaggtgatggttgcagtgggaggccttgggtgggtgcagctaaccaagttcacctgtggggataagagtgaaggtttgtaagcaaataccagggaacgtgccctgctcctggcacctgtactgggggttgctctgcacacctgcatggttgggggtgtgtgtggcttgtacagcctcgtggctgtatcctgcccaagcactgtgtgttcgggggaggttcagcctgggcttggctgtcctcatggccagcatccaagcgaggaccctcacttgcctgccctggtcctcagcaccatctctgcccctccaggttagccttccctgagcccagagcttgccagttcccttacagagcctttggcctctctggtctggcactggtctccccaagtcctatttcaggagggggctacagggatcttattgccatttgtgtcacagtctctgaggatgttcacagcccagttcccgggcctggccgcaggtggtggagcaggccctccctctgtccagccctgctcctgtgagctgcaggcagcgccttgttcctgcctgcagctcacatggagagggagccttttgtggagcagcttttggcatatgtcgggaagcctaggaagtgggtgcacttgggttttgttctttaaagctcctgggtgctcaggcctctgcccagcccagcttgggacagggagcacatggagctggcaaccttggtccttcaaagcatcattgcccctgacctcaggacctgtcctctgctcagcagaccaccagttttaattatggttaggacgtggtcagtatggggcactctgaggacaacctctgaggtcctagagtcacttttcttacagagtatcatataggactgtcacacctgcccaagcatggccctgggcagctgttcgatcactctgggcctctatgccatttgtcggtaaaatgaggggctcctgcctgtggcatggaggagaggagttgctgagccaatcactgcgggccccaggcatggtgcccacccctggtgttctctagtgtccttctggtgcaccagccggagccttctgctcacaagctagctggcggccacctctcctgcacctctccaccactccaccactgggctggcctccctttgtccagcctgctcctgctccgccctgcccactggctcccagactcttgacttggcttctgccataggttgatggagctctggtttctttgtggtgcctcaggcctctgcaagggattcagacccttctgcgtctttctggactcattctttggctccctcccgcccatgtgcagcatgggattcagactgaggtgtgtgtgtaataaatgtgggcctcctcttctctccactttacgggggaagatgggcttcctcatgaccctctggaggatgccctggggaggatcatgttgtggtggtgtttcattgttagacctccctggattgaagtagctgaaatcctagccgacgtttatgtgtatttagacatgatgcactggtttgggctaggagagtcattgtgattgattggctgtggccctgaggttcgtacagatgttcccatagagggtaggacactgtcccgtggccagttggagcagtgactggggacccagggagcagaaggggacttgaggccccacaaactgtcagagaaaatgaaatgcagttctctgtggctttccacttgcaaattgtgtgaccttggacaagtaagtagaactgtctgagccatagtttccgtccttgaaagctgggatggaagtgactccctgctggggtcgtggaggaccagaggaggtcacctcagtgaagctgcctggcacgccatcggggagagcctcagagaaatttgaatgagtaaatgtctggctgatcccaggagagcaaggagaaagatggagggaggggaagagggaggagggctgcagtccggggctggggcatgggtgggggctgctgtgagacaagcctggccagtctggctttgtgagctggtggcaggaagaggaaggtagctgggcttgctttgggaatgtgtgtgctgtgggccccagtggaggcccgggaacttagcctgtgtactgtcttggggggatttctcccttctgggtggggattgggtctggagcctggaaacacctttggtctgatgacctaagccccaggcattccatcccatccttggctcaggctaggctgggacctgggatggctccagtcccagctctcctattagccccaggagtgtgcagctggggcaaggcctgagggtaaaccagaccctccagcctctgcaatgcctgcccaaggtcaaggctcttggctcaaagcgacagagaaaattctccccatcaggaaacactctaaggcttccctggacatggcactggctttgagggtctctgggctaaatggtctcactccgaatcaagcagggaggccggggagaaaccatgggttcagggaggggagtgaaatcagagcctctcaaaggcagaaagggccaggaggcctggaggtggctcccagggtctgatgcatggaaatgaggagtcgcttagtttaaggagaccgtagttctctgtgtgtagaacgccccggggtggatgcacgagccgcctgctggtcatctggaggtggcgcatgggctctcttgtgcctgtcccctgtggcagaggcccttcctgggcctaacaccctcatgaaatggcctatgagcttgaacctgggcctgaatgtcctcactaataacccagcaccgtttgccaaaaatcaggccaggttgcctctggagagcctgttaactgagtgacttgctgtcacccagccttgcttcttctccccctgtcctccctccactgctcccgcttttgtgtgcaaataggcaggcaggggaaggtttggggctgtgtccaaaagaagggcacgatggatataaaacgtaagaaaaaaaatgctcaataatttggtcatctggaaaatcagccagaggtcatttgggagacaagtgattttgtgacctggtttctggtgagttggccactaggagaactgctcactcgaagattttgtcacttggggaactgactttggagatttggtttttgtggagtggagctgatttctgaagtgaaatctcagcacagaggtttacaggaagccagagtcctcctcacttgaaaactcacacctcacccctggtgcccctcaaggctgtgtctcggctttgtccccacggaggggagcatagtatgttcttcacggtggtggactgggatctctttgtctcactgtctctccgtctcttttacacacatactggagcctttgtttctgtctctttcatgcacacacacacacatacactgaagtctctgtctgtctcgtgcacacacgcgtgcatacgctaaagtctctatttctgtttctctgtaatgcatgcacacacaggcacacacacgcacgcacacactgtctcgctcatgcacatatacacacactggaatctctctctgcctctgtctctttctctcatacacaccaaatggatctctgtctctcacacacacatgcatacacatgctaaagtctctttctctgtgtcatgcatgtgcacacacacactgtctctgtctcatgcacatacacacatactggaatctgtctgtttttctcatgcatgcacacacacaccaaaatctctgtctctctcatgcacacatgcatgcacacgctaaagcttctgtctctctctctgtaatgcatgcacccacccccccatacacagtctctgtctctcatgcacatatgcacacactgggatctctctctgtctctctctctctctctcctgcctgaagcctccagagaagtaagttgaatgttgagcagggttttcccacggggtggctcagaagcagccgtaattggagggagtagggaaaagacaatgcactgtaattggtctaaataacccttttcgctgagtgttaaaggcaagtaagttctcaggagcagacctggctttttcctccctaggattttcttgctgtttggaagtgcttgttcctggagggtgtgttcatctctctcgggggaggtcgggatcctgggtgctgttggggtttgctgctgtagggggtgggggcgaagggcaccagacagtgatacggtggaaactgtaccgtgcatgcctggggctgtctcacagatgctgaatctgaactcaccatttctcctccagatctggtctacttttgtcttggctggtgacatcactgccactggatgatgtttcttacttttgccacggccactgagaaagctgacaccttttcacagctttcagtgattgaacactgaccttttcaagcatccttgcatctactcctccatctgcaccattacagtccctcatcatttcttacctagactggcacaatagcgacctatcaaggctttctgtcaccaatgtcttctttctctaattcaccccattggtcaccagaggagacttgggaatatgagtctgattagtcagatccaagcttgaaaaccttcagtagctcttcattgcctcagggtcaagttcaagctttgcagcttcatatccaggaccctttcccacctggcccctcccttcttttgcacgatcatctcctcgtcttctcactcatttgcctttggtctccggcagtgctgaactgctttagctctcagcgcatgcacaggctgctccttgcttatgcctccattttttcaggcctcagtgcctttgcacatgctgatcttcctgcctggaaatgcctttctttcacctcgtgccatgatgaatataataaggccaagttccccattcttttaggtaacattagatacactctccttgtgctatttctgttctttttttgatgacaactatcatgctccaacactgtgctattattcatttgcttccatatcctactctcctcctccttcagccccagaacgtggtgttcaaagacaggaaatacgctttgttcacctctgtatccccagcatctagcccagaactcagcccaacagctgattctggctgggcgcagcagctgacgcctgtaatgccagccctttgggaggctgaggcaggcggatcacaatttcaggggttcgagaccagcctggccaacatggtgaaaccccgtctctactaaaaacacaaaaattaggccgggtgtggtggctcacgcctgtaatcccagcactttgggaggccgaggcaggcagatcacctgaagccggcagttcgagaccagcctgaccaacatggagaaaccccgtctctaccaaaaatacaaaattagccaggcatggtggcgcatgcctgtaatctcagctactcaggaggttgaggcaggagaatcgcttgaacccgggaggcggagattgcagtgtgcagagattgcgccattgcactccagcctgggcaacaagagtgaaactctgtctcaaaaaaaaaaaaatagtgactcattccccctaagtgaattcattccacaaacatttaccaaacactcccctgtgccaggcacagctctgggcactggaggtgcattggtgtgagtgtcaaccaccgggttaacagcggaaaggtccgtgatgtccttgacaagagccgttgcagtggggcagtgggcagatggggtgggttcgagagatggcaggaagagaggaagtggagccagctggctaggtcatatggaattctctttgtcaaagggtatggaggcatggtggccattgaaggagggatcatggtatcaagagggagatgtttttataaagacagagggtaacttaggccaccactttcttggagtctttttttttttttttgctttattgagggcaaagaggtagaggaaatggccttttgggagtaagtgagtgagaaaggggagagagaaatacacagagaataaccagatccacaagttgagacagtctatctgcggctactccctgtacccatccctatagctattgctgtatctatatctaaacacatatacttcccctgccacgcatattcacacacatctttatagaactttcaatgatttccaaagatcctgtggaatactggtgtgctgccttgtggggagaaaagaagactgagctagtttacagtcccaccaacagtgtaaaagtgttcctatttctccacatcctctccagcacctgttgtttcctgactttttaatgattgccattctaactggtgtgagatggtatctcattgtggttttgatttgcatttctctgatggccactgatggtgagcattttttcatgtgttttttggctgcataaatgtcttcttttgagaagtgtctgttgatgtccttcacccactttttgatggggttgtttgtttttttcttgtaaatttgtttgagttcattgtagattctggatattagccctttgtcagatgagtaggttgcgaaaattttctcccattctgtaggttgcctgttcactctgatggtagtttcttttgctgtgcagaagctctttagtttaattagatcctatttgtcaattttggcttttgttgccattgcttttggtgtttagacatgaagtccttgcccatgcctatgtcctgaatggtaatgcctaggttttcttctagggtttttatggttttaggtctaatgtttaagtctttaatccatcttgaattaatttttgtataaggtgtaaggaagggatccagtttcagctttctacatatggctagccagttttcccagcaccatttattaaatagggaatcctttccccattgcttgtttttctcaggtttgtcaaagatcagatagctgcagatatgtggcgttatttctgagggctctgttctgttccattgatctatatctctgttttggtaccagtaccatgctgttttcgtgactgtagccttgtagtatagtttgaagtcaggtagcgtgatgcctccagctttgttcttttggcttaggattgacttggcgatgcaggctcttttttgaaagtcaatgtggcgattcctcagggatctagaactagaaataccatttgacccagccatcccattactgggtatatacccaaaggactataagtcatgctgctataaagacacatgcacacgtatgtctattgtggcactattcacaatagcaaagacttggaaccaacccagaagtccaacaatgattgactagattaagaaaatgtggcacatatacaccatggaatactatgcagccaaaaaaaaatgatgagttcatgtcctttgtagggacatggatgaaattggaaatcatcattctcagtaaactatcacaagaacaaaaaaccaaacaccgcatattctcactcataggtgggaattgaacaatgagaacacatggacacaggaaggggaacatcacattctggggactgtggtggggtggggggagggggaagggatagctttaggagatacacttaatgctaaatgacgagttaatgggtgcagcacaccagcatggcacatgtatacatatgtaactaacctgcacattgtgcacatgtaccctaaaacttaaagtataataataataaaataaaataaaaaaaaagaaaagaagactgaggaggaaagtttagactaaaagtgatttaagagatgtatcaaacaattggctatatgtatagactttgtcaggattctgatttgaaaaaattataaaaaaaaatgtgtgtgaccatgggaagatgtgaatactggctggatattggaagatagtaagggtttgtttactttttgtaggtatgcttatggcattgcatttagaaaaaattcttgtcaggccaggtgcagtggcttatgcctgtcatcccagtactttggaaggccgaggcaggaggatcacttgaggccaggaatttgagaccagcctgggcaacatagcaagaccctgtgtctacaaaaaacaataaaaattagccaagcatggtggcacacacctgtagtcccagctacttggtaggctgaagtgggaggattgcttgagtccaggagatcaaggctgtagtgagacgtgattgggccactgcactccagcctgggtgacagatattctgtctgttaaaaacaaaataaaacaaaaacaggaaaaatccttgtcttttggagacacaattgaaatgtatacatgtgaaagatgtgatgctggagattttcttcaacttaatttgagggtgggtgaggtgtaggtggtaacaactgaagttgggtaagacatacacaaggcccactacccttttttccaatgtttgaaatttttttataataacaagtaaaataaaatcatataatagcatttttttcttagttatacaggaatcttgtgtgctttttattttaggttttacggccttaacttttctggaatattaggtgctgttatcacttgccggctagagagaggagcagatggcaggatggatggataagtaatgagcaaatattaatgagaacaggaaactatcaatcgagtttcctggacagattgcttttatccctggatacttctgcaaaattacatgcatataatatagtcatattattttttgctagaaaatgattcataccatgggattaagtagggcagtactttgcggtgggagggaggtttatagaggcttaagtgtgggctctggaggcagactgcctagcattgcactcagtaatcctctgacctggggcagtaactccctatctgcaaaatgatgataaagtaggtgtatgcatgaatatgtacctgatgtatactcacacaatggagtattatttggccacaaaaagtaatgaagtactgatgagtgctagggtagcgatgaaccttgaaaacattatgccaagtgaaagaagctagccactaaagaccacatattgtatgattccacttatatgcaatgtccaggatagctgaatccatagacacagaaagtggctgccaggggctagggtgggatgggggtaggggagtgtagagagtaattgctgatggtaatgaggttccttttttgagttgatgggaaagttctgaaattagattgtagtggtggttgcaagagtctgaatataataagccattcaattgtacacttaagacaggtgaattttttggcatgtaaattatatctcaataaagctgcttgaaaaaaatataccaaccacatcacagagttaaggattaaatgaaaaactgtgtgtaacgtatttcctggcatgccgcgtagggtttctaactccaggtgcttcgctgaaatctttagggaagagcgtgttcctccggcgtttgctttctgaaatgcttgatatgaatcatgctatgaagactctggaagtgagtggtttaggtagaattactatttcaagtttctaatgaccacatactggtctggaattaaaaggcttctaaatggccctaaagtagattattcatattgctccaactttttggtctttaaaaccatctgtctttgaagcttggaaatcttttagacagtctacagtgtggcatttccttgcacagcccccaccctacctgcctctgcagaacctcctcttttcccatgggacttatgtgaacgcctgagccctgctgacatcttcaccctctgggtccccacctcggttaatagagataaagccagttagtagctaatctaatggactcatgatgtcctagtttatctctctttcttcaatacctccttaattgcctaaaatgttatgggagagacacagagctagctgacccacagaactggtggggttggccttgcacttggggattttcttcctttccaactttcaggcttgcataccaaatccctgggctggaggcagaaacgcttctattgccccaggtcccttccctagtggttctcttgagcttgagaaggatgagaaccatccctttaatttaagctcttgctgccctggcaggtccaaagcatgcttttcatagtggctgcaccttgggatcccttgggaagtttcgaaaaatacaggtgccttagtcctgcttctagacgctctgatgtaactggtatagggtagagagtattaaaactttccaggtgattctagtatgccttgaagtctgagaaccactgcctcagaaggaagtcacgctgaacgggtggtggcggtctgaaggcagggaaaagcagaagtgcttaatgagttgggggaggaagcgtggggggtaaacgtttttcttgacttgagtgtagaggagaacctgtgagtaaacatgctattttaaatgggttggcatttggctgaaaatagacaggaagcacggatccagaaatccattcagcttttagaacgtgaccccaaatagcttcactcctgctctgacacatccccaagaaggactcttcctcctttgtcagccaaacatgttagcagttgtcttctggcacttggagtgcatgcgcacgtgtgtgtgtgtatgtgtgtgggtgtgtttgtgtgtgtaggagagagacaatagaaaggttgtgcatagccatggcaggctctctgcaatgcttctttgtggttcactggtcccttggggagcaaagtggggaccctcctaaagatgggcaggcccagcagggagaagagcaggtccattcattaaagaacagggcattgccctctcctgggggagctcacatttgtgatggggcctatggagggcaggcactgtgctagggccattatctcctgtaggcctcaaacgacaatcctatgagaagctctactttaccggggagtcaactgaggcttgtggtgcatccaaggacatacagatggtgggcgacagggacctgattagaatcgctgtccactggaccatgccatccgcctgctggctctgaggtggctgctgcggagctgacacccccagatgctctgggagggctggtacagaaacccagtcctgtgggctgggccagagccactcaggctctaggtgtcacgttgggcaccgttgtggtcctctttggctgtgtgattccctcaagccccaggcttgcctggagaccttcttgggagaggtggcttgggataatgcttttcattaaggatgggcggaaaggcctgtcttctgagagtccatggcagtgctgattcagaaccccagggccaggtgcctgtggcttgcacggggcgctttcctgccccgccttggcctctgagagctccagctgtgctctgagcaggacagaggaagtgactgtaccttgaagaagagggatcctcagaagacccagtggagccacatgggctgccgctgggctgtttcagcggtaaatctcccaggatgggacatctttggggagttcctcctgcaggccatggcagggctttgcctctagcaatgggacatcttctggggactcctgagttgaactggctggtgggggtcttctgcctggggattgaaagtgaccatgtttcagaaatcccaggctggactgctgctggaaactgctagaggaattttgtgctcttctgacttgctgactcaccaggccttatgggttgccctgtgtgctttccctgaggtttcaggctttggttcccaccctcgttttctccttggcagcatcccttccaccacccccatgatggaactgggcacatgtgggtacccctgtgcaggggcatgctggaagctggcgtcctaactccatgcttagtaatatcccttggtagcttgaaatctaccatggtggaaatatttacatcaaggaagttggtaaatgctacaagtcaggggtttatttacttccagagagccagttaaacctctcctagcataccactgcccctggggctacagcgtggcttgacaagctcaacagtacttgcctcattctctatctgtttggcctaaggtcattgccggaaggcacctatctatctcagggcagtgtttccagaggccactgtggcccttttggtctgctgtgaccaaatccctaggtctgacacaaggccttcttgttgcagtccggtctagctcttgccatgatcctggattggcctgaaccagtgcactgaagcatcttttacgtcagacacactgtccttcagcctttctgcaccggcattgtgcacccatgcaggtgtgtgagagtggggagcaatgcctggctggagctgtgggcctgggtcccctttctagcttcaatttctttccccacagaccgagctgaactcacaaggtccagctcatactctgtgcccagggagtctccctgaatggtgctgtcacctgtgccccttgcctgggatgcacacctgccttgggtctttgccctgccctgtcccccagggtaagtgggtgagttagaagaaggtctttccagaggcaggtattttgtgggtctttgagtatgtgactgggtatttctatgtgtctctgtgtgcaaagcctgagtgtgttctttccctgccagccttactcaccgctctgccctgggcttgctgaggctccctcagggctggggtgtgtgaagaagggcagctcctcagggtgcagtgggcacttggctcagaatccttcccacacctggcagaggggattctgcatccacaggtgttgtgtggacagcaggctcttgggttctggagattgtcatgggatcccggtttctaagggcttcccagggctcagatgtgccctcggtaaacacagcccacagcttgggcagggcctcccatctcagtgcagtgcacgagggcgggcgagtttcacttttcccagcctggggtcacgccccttgcctgcattgtctcctcggctccacacacagcctggtgagattgtgtgcctatttttcagtagaaactgaggctcaaagtggttaagtacctgtttacagtcacacagcccataaatgtcaggagaaagatttgccttagactcgaaggtccacgctctgtctcactgtcaccacactgcctcaggcagggaatggaggtccactcatgcaggctcaccttgccccgtagtgcctctggtggagtccagatgtttttgggctgcattcatttcaaaccactgatgccatgtctgcctccatcaagcagcctgcctaacagcttcccctcttctttggttttcaccacacacagtgtgctcaaggctgtgggggtctatggggcttcttgtagctccttctgtcctggagaacccactgtgagcctggcctggtgcctccctcggtcacaactgcttgcctctgggcctcctctgctggagcacagcgtcttcttctcacagatgtctcctgagagcctcaggcaggaatcctaggtggtagctgcccgagctgagtctggtgcttctgtgagaaaggcagaatcagtcctactttgtgtctaacatcagagtctctagaacatgctgaggagggccgactctgcagtggtggtggggcaggaaggcagcaaaacctcagtttcctcatctgtaaaacagctacaatgctatggaccctgcctggccgtggggaggaccagctaagatggtgcacacctgacatcttggccaaagtgtgaggctgctgctggaaagcccgccactcccccagcaaccactgtccccacagaaccttggcaccgtttgcctgatcctgaggtccttgggaacagccaggggcagggtgtctgtggcctatgggatctgtcctctacttcctggggagatgcttggttctcttccagagtgggcaagcacatattctgggaccagctcggtggttccttctggaaggcaggcactctttcttggtggggcctgcactcaggccttcagtcttcctctgtggccccttctccctgatgctcatcctcaggaagacagcagcagggagggtttggcctcctgactggatggacaccctcccagggcccaggcccctctgtcctgctttattggaagctccttggtcccccaatagatcagtgctctcagaactgtggaaaaacctcaggtctccctgataagattgtgctggggtttgcggggaagatgacagagctgcagggagggagaggccttccccttctacccttgttggctgggtcttttctgggctgggtggggggtgctccccattcagcctttctgccaataggccccagattccttgctgcagaagaaaagtagcaatgcccgtaagttcctgaatgcaaaggcaggaaggttttgcacttgagatttgggactttggtcttggggcctggctctggcttaactgtttgggaggtaaggaggtacttgggccagagcagcaacaaagcctgccgcaaatagtgtggaaatagagactgcccagcaaaagcttagacatggctgtgaggactgaggggaactgcattctgctcacataaaacctcctgatttgagaaagcagagatggagtatttggtcccacctaaattttaagtgtcagccaggccaatttatgctgtggcgccaggaactgggctgttgtggcagcaggtcctactttgccacttcccagctgtgccaagttactcatcctctcagaacctcattgtgcttatttgcataatgggatagtaatataggccttgcaagttctcctgaggactaggtgagaaaacatctgcaaaacacaggtaaagctgcacctcctggctcagtaaatgctgctaagatagtgacaatgtctgttggctgcataaatgtcgttttttgagaagtgtctgttcatatcctttgcccactttttgatggggttgattttttcttgtaaatttgttcaagttctttgtagattctggatattagccctttgtcagatgggtagattgtaaaaattttctcccattctgtatgttccctgttcactctgatcgtagatatacctaatgtaaatgacgagttaacgggtgcagcacaccaacatagcacatgtatacatatgtaacaaacctgcatgttgtgcacatgtaccctagaacttaaagtataataataaaaaaaaagatagtgacagtgatataaagaaccgctgagaacaacagaacgcacgtgatggaggctgatccatgggtctcatttactccatagttagccaagccgtaatgaatgtgaaatgttcccgtgtctttagcattttggcatctccctttgcgctaatgtccaatcagcatgaccggagcctcctccgattgtggtgggaaccgttgctctgcacaggatttctgggggtgtgaatgaggagtgagtcttacctcctgaatcccaggccctgctgaatgtcggttcctgccagccactcacagcgccgtcttgccctaaacagaagcttcccttggtttcctcccctgagcacctcctgggaagtggtcagtgggacagtttgtcacttaaaatttgggaaaacagggagggatggccactcaccttgatctcaactccaagaattctaacccttagaaccccaggcccagtctttataaccttaaacccaacccagaactggaaacgacttaccacccaatattggatctccctctttgtagactaggccagccacaggccgcctctttggccctgggcttcagcaggggtgggccctcagccctggctcaacacctcccctcttctcccagccctctgtctccaggaggccagcaagcaatgctgcagttctgccctgcagggtccgtgtgctcccatttccctctctgccttggtctagactgggcctggtcctttacacagaaaaagggctattcaggcattttcctccagaaaccttgagcgccgagcaacatagaaacttgcagatgctttgacacaaccatttgtcttggcctcatctcagatctagctcttcatcagggctttctgcccactctgctcctcctcctaccaccaggatgtaataaaggagcatgggaaatgtgcactgcgagtatccctccaggatcacagattttttttttcctctattggtcatagctggggttgattgaaaccccctgtggctgctccatgactgttcgtcctgacaggcacagtctgcctctggagcacacagcagggcagctgaaggtacttctgccattgttggactccccaaatttcctaccccccactgaacattcgcttctgtccactgttctttgctccatctctctggcctttggatgcctggtctgccttctggtccccatcacccaaggacatgctttatcaccacccatgctgcctcctccatgctgctgatgtgcccccagcttcatccactaccccttggggccccaagagagaggctgagtgagtgtagggccgactacattggagggaatggcttccatcggtcctggaggaagccaaaccttcagctttgttcatgctattccatctgcctgaatgttgttccctctcccacctctctgtacccattgcaaactcctcctccatgccttggcttaaactcattttcttgggaaactctccctgaccccctgatgaagttagactttgtccttgtttaactgtaatttaactatttgattgcgcaattatggacttaattacccttctgtttcctccactgtgctgggtgagggcagggactgtccctctaagactgtgctcagcaggctgcctggaacacagtgtcacttagtagatatttatcctgtgcatgaatgaattaatgaatgaatgcttcaggctgcggggttcagggctgggcctcagcactgagcgcttttgttctctgctccctggtgctgctgggggtgggccaccccagcgctggcatcctgggaatcttgctcacctccatggttctgaacctctctttccttctggttcctgggctgctgttccaggtcgctgggctggagcctcccccagattttgtcctttaaaactcattgatttttgtgctgacttttacagtacaaatgtcatcgttagataaaataattgaagcgggtaatctattcactgagctcacacagcccctcccactctgcccagcctggtgcaccggcaaaagtgctgccccggtttgttttgacaactgttccccacctggggtcctaggactatggccagctggagtgagcagcaccgggtggtgcaggggcctcaggcctgagacccttccttgccttgccagtagcttctgagatggacagggtgatgtaagcagatgggtgaggctgagcaggcgaccacataccagcggggggtgctgggccactcttcctcctctctgttcttcatcctctcagccatttggtggggataatcatacttctctagaaagaagattaagagaccacagatggactgcccccaccatccctgccaccgagtggggactcaacaaacattgtctgacccaggcctcccacacagagtccctgcttgtggctctgggccagaagagcagccagaggccaactgcaggggcaaggctcaaagtctcagcctctgaccgcttctctgcctgcctggtcggtggctgacgctatcagtccaaagtatcatgctcacagtcttcatcactggcttaacagctgacgtgttaacagaggatctttaagaaatgcgtcaaattaacgggtgcagcatcccaacatggcatatgtatacatatgtagcaaacctgcacattgtgcacatggaccctagaacttaaagtataatgaaaaaaaaaaaaaaaagaaatgcgtcaaaacatgctgctctggggctcatgctcataggacagctacaccccacagcccctagctctgtctctgctatgggcctcaaggacaggatgggccatggagcgcctcacctgggcttgatggagacagctggcagtgccatggcccagggcagccacaggctcagacgcaagtgccaggccaggctgtgctgctcccactcccgttgtttcaagtggctccagcctgccccatgacaacctgggatgcataaagggcactgagggtactggcccattggaggtccacagagtcactcccgctccctgcctccacctctccagcatcctggccctcagttttggaatctcagcccctgtgtttcctcaggttcttataccctaatgtgctacttacttagtacaggcctctccaactcaacaaccccctgacactggctttcagaaggctccttcaggcccatgcccatgatgatggatcagatatatgccccctgccaggctgccctcctggagagaaatctgcaaccccaggactctgttcgcaggagcccatctcagccctgtgcacagggcatgacccagaaggttctctctgggtgttgggacagatgcccaaaggccacttccaaagaatagtaaagccaagaggaatgatttctccaagcagtgggtcatggacaaccccacccaacaccctcacctgtccactagtgtgcaccctgctggctccagatccagacagactttttgcctctatacttttgaaaagttggccccaagaccctttttatgcacaggacacccctgtttttagggttggatttgcagaattgggaatggaaattgagtctgagctactatgtgccttatccatggaaagcttctgaagacaaacaagattggctgccccttgcttttaggtgagagaacacacagtttgcagttagctgtccctagtgggcttgggaaaggaggagctgtgtggctgggctttgggtggctgggatggggatgtatggctcttcttcctgttccctgcatggggtgagggtccctgggcctcagcagggacacggtaatgatggccccatgattttgcccttttcctgtctttgcttctgggtcagttccctccttgtgatggctgcaccctcttccctttttcctccctgggccttgctgcctgggacaccacccacccaaagccccaaaaggtgtggaggtccatctagataaattactaaccccaggacacatttatacatattcatttgtttaatatttaattttaattagaagtgaaatggcattgcaaaaacaccctgccactgccctaccactggttgggtgtcttgccgtccctccagagcaggacagctgccaggagccctccctgggtgaccaccagcattttccttcggtaaacagacagtgacaatcggaaatttgtacaaaatacaacacacttgtttttctgccttctctattgatttggttttagcagggagaagctggatgtaatttttgtttgatttcctcttggtttctgagtggattgagatgttgttatcaattcctccacctccggccatttcagtgatccagttccattgtgaccaccaccacctgcttgcaagcctgtggctcaggcaagtcagccagcaagtcatctccacctgcttgcaaaaaaccctgcccagaaccagggtgatgtggctgagatgtgcagcatttttgggaaggcagattctgactgatgagagataagccctcctggagactccctcaagcactcatggcctacagagaccctcagttccccagcctcagctcctaagattactttttggcttagggcactcactgagcctcactgttctcatctgtgtaatggggttagggcatttctcatgggaggagcaggagcgctcggtgggggtagcacacattagcctgccccagagcctggcaccaggtgggagcttcgtaaatgctgttcccttcccgcagctgcctgtcctgactcagcttctcaggctgagtcactctccaagtgccctgtcttccctcttacaccaccccctatgcaggcttcagaaacctctagctacctgaatgtgcctgaatgtgctaggatgtcaggccccggatttccctcctgacactccttgctaccagcttattttctcatgctgtctcttattcctaaaagcatggctcacaccttagttctttgggtcaccggggttggacggccagggtgtgggaatttcacatcatgtagcctgtctgttgttgctggtgctatcagctgagaggtgggaggcctgggacaatgcacagctttcctgagagccagctgggtaaacactttttcacaagaacaccctcattcttgagtatttaggggagcacccaaacagatgctgagagatcaaggcaggattttggcctctaataataaggatgctttgtttccagcacgctgagcgtgtgctcagacagtgggctataccgttttaagagaacagcttttgggctggagtctcctagactccattccctgctttaccgcttataccctgtgtgaccctgagcaagtcacttcacatctttgagccttaggctactgatctgtaaaaatggggttattattcccccctggaaggactcttgcaaggactatatgagggagcacatggttcctggcacatcataggccctcagcacatgctgtggccttcttcctatggcactgggggttgctgatgatgagcttctttctgctcagcatgtctgggcaggcacttgggtctgaaaatggtgaccaccagcaggttgctggcttctggccattcagcctcctgaccctttgttgaccatgcctccttcttcccctccactctgaatgccagaaagtacatagtgaactttctttttgttggcataattctgcaaactcctgatgtcactggtcctaaagagttactccagagtggcgatgctagctagttggtctgcaggaggcatggcagctgggaggggaggggaagaataggtgatctggactgaactgggaattctacatggttgaaatgaaatttgtgctttggtgaggtgcatgcagcaggagggaggacaggcacacagtgagcatttgcaggatgccttaggactcagctgtggctttggcaagaccaagcatagcatacacatctatgggtggctcctttgtgtagaaatcagacccatcctggcttaatcccccagttgagggcttggtgttctggaggtatggcatggacagttgtgctttggctcacacgatgatgatgatgataatgatgatgatgctggtgttgatggtggtgatgttgatggttatgatgatggtggtagtagtggtggtgatgatgatggtggtgatgatgaaggtgatggtgaaggtgatgataatgatggtcgtggtgatagagctagttcagctcttaccacttgctaggtactattctacctgctttgaatgtagatttaattctcgtaagaatcctctgaggttggctttgttatcatccccattttatagatgaggaacaaaggcagagagaggttaaaattgttcattgccaaatggttggtaaggggtggagtccagtgttgaaccctggctgacttagccctgtgccccctgcctctgtcccatgaatgatgagcaggcatgctgagcgaagctgtgtcctgtggcacagacaaggctctggcccagctctaacagaaatatagttgtgcattgcttaatgagaagtgcatcttaggtgggctcattgttgtctttactgtgtacttacacagacctagagggtacagccacctatacacctagactatatgggatagcctattgctcctaggctacaaacctgcacagcatgttactgtactgaatactgtaggcagctgtaacacagtggcaagtatttgtgtatctaaacaaatatagaaaaggtaatgatgttactgtggctatgatatcaccaggcaatagaagtttttcagctccattataacctttgggattaccacgttcattgttaactgaaatgtcattttgtggtgcatgactgtatagtgtgaaccgcatatgtaatttaaaatttaaaaagtaaaaggtgaaattaatttagtatatttcttttagcccattattgtcatttcaacatataattaatataaaaataattaatgggaggccgaggcaggcggatcacgaggtcaggagattgagaccatcctgactaacacggtgaaaccccgtctctaccaaaaatacaaaaaaattagccgggcatggtcgcgggcgcctgtggtcccagctactcgggaggctgaggcaggagaatggcgtgaacccgggaggcggaacttgcagtgagccaagatcgcgccactgcactccagcctgggcgacagagtgagactctgtctcaaaaaaaagataattaatgaaatattttgcattctttgttttgtactaaggctttgaaattcaacctcggctttacacttacagccgatctcagttgattccacctcgtttcaaatgctcagaagccccctgtggcttgtggctgccacattggatagtgtgggatcacccagactctgtctcagggtgcacagtctgagtggggacatctgctcatattttgcttcccattggtcacacaaacctctcagccatgtttcagtgtctcctgactcatcccatggcctcccagattgcctctttgaataatttcccatctctgtggtacctccgtgacctcacacatgtgcttgttttggtctgggagccctttcaagtggggttggagctgagtcctacagagcagagagagtttggaaaggtcaggagtcagggtgctggtgaaaaccaggacaggtaagtggcacatcagctgcttccagtggcttagtaggtgagtgagtaatttctgatgatggtcatcgtagctgcaattcactgggcacctccacaaatacctggcctttaattctcacaatagccctgtaatggagatacatttccccttttaattgtaatcagtgttttcattggtagggagactaaggtgcagagaggtgagaggcaccttagttgatggatggtgaagccaagactggggccagggctgtctgactcccagggccaggcccttcccctctgtcaaggtgcttagtctcaggccgatgaatggaaattcttccatggacccggagccctggaggcttgtgagcaggcctgtgtcagagcagaagcactgcgttgggggacaagtctggcatgaaatgacacagcagaaaatcctgagaattcatgctgtttatgaaaatcctcttgattattgtctaggctgtgctggttccatgctccaggggctcaacatcctttcagggagaccacagctcacctgtgggagcagctggagccggagctcaggcagccacacttatggacagtcccgaggaggctactatctcctatattttgcataatgatggagagggtgctgacaacaccttcactgactcttggctttcaacttgcgttggctgtcaacttgcgtttataatttaggaggattccaggttgtccctagggtaacctcactgtcactccctggactttccatctgctttcttccatggggcccacagaggtggcctaagaactcaggttactgggaaatactcccaattccaagctgtccgtgggaggggtcctgctggtgagcacctggaggagagacgtgtttagggagagaaaaggttgagcatggcatacaagcccttctttacatttctccatttgtcactccactagaagttctctgggggcctcgccagcatgcatggcataggcagcaccgttttgtgctcatcacccttgagccctccgagtacccagtggtcttggccaccctgcttactggaaatgcccccttttcctgcttggagggcatttgccttctgggtctcatgccatgtccttagccctcattctgtcttgctctgtatctcttcctgggccaacattcacatttgtggcttcagttgttcctctgtggtgaggacacagcaaattacatctgtagtcctgatcatgtttggactcaagttttcaagcatctgattaagatgtgctttaatacctcacagtaaacaagcccccatcagaactcgtagcttccatcctaagcttgttcctccttctctgtttcgtggattcactattgccaccttcaggcttccagaggtcctgtttggaagcctccaagccatcctagcctcccttttcttcccctctctccatccagacagtcagcttgttcactcttcccctgagtgcctcttctccttcatcctcattcactcctgatgcccctccccttggagcctgcctgtcatcctctcttgcctggtctgttgccacacctcccactcttgtccactgttctctccagaccacttctgttggcccagccctgtttatgtccttccacaactttagggtatccctcctatctgagggtacagacccatcatgctggcctttgagacgtgagatcacctggacatgacttgttctagacgtctcttctgacattcccttcctcatctgctgccacatagcaccattaatcacaagccacacatttcttgcttctgtgcttttgctcttgtggttctcttttggcaatgggtgacagaaactcaccttgagctaccttagttaaagtgccagggccatctgagcctctggctttgtcaaaccagggacccaaatgtggccctttgttttcttcacctgtagatcggtcaattccctcaccccagcttcccccattggacaagaaacatggcagctctcacctcctgagtctcctaccagctttgtctagagcgccatccctcttctcttagttacagtttgaaaaaaatcagggaagggctctgacaggctgggcctgaatcatgtgacctcttctggactaatgagctgtggccagtgcctggggcacagggtgcatggatggcagcacccactagagctataaaatcggattggagcaggataaggagtcattcccccaaacaagagcagggagctgtttccagaggaagacggatgtgctgggcaggcaacaagctgtgcatgcatctgctgcccctctcttctccccttgctcacaccttcgctagaggccaggcattcttttgggctctcctaccatttacatgtggatggagttccgaattttgcagcttgttgcagctgtctctatatctgactccttctccagcctgcttgctggacagtgctcagctaggaaggtcagattgcggactggaacttgccttggatgtctgggggctttgtcctccccatcagcaggcatggtcacccttgatgccttgcacccatcctgttgctcagaggtttccctgccttcccatcctcctcaggcctgtatcctgccagtggattttcagagcttcctggaggcaagcacacagcccagccccggctagagattcatgactttcctccctcctgccctccctattcccctacacccactagagagtcctgaggactattaacctgtcccctcgtttagggctgatgtatatattcagtgaaaaaggcaggggagtggagacgagaatgggggacttcctccagagcttctgacacctctgattgccccaggaacctgtgctaacccacagacaattggatctcccctttatcctggtgacagggcttgtgatgaattgctcatattttattcctcaggaagttttattgctattccagaatggtaggattaactctaaatgctttctggggtgttcatttccctctaaactggaaatcactataattgcaatgaaaactctgactcagaatctgaatctgccctttcagttgctcttgcaaagttggttaaaaaaataaaaaggcagatgtgggttaggaaagagcccatttggtgtcccgggcagaggctgtgtggttgacatcttgaagaatggcaggttggccgtcgacagccaaagtgatcaccagctattggctgcaggcaggggctgcacagacccagggccaccagagggccttccccagccttcagcaagccatacagcccgtggtgctggcctgggcagagggcatctggcagagtgtggatttatttttgattattggattttctggaaggtgaagggggctaacaataatgaggggcttctgtataggaggcatgttcctaaatatcagaaagactcagggcaggggctttggagtcagactgacttggacttgaattgtggcattggcactcacctctccaagcctcaattttgctatctgtaaagtggggataataatagacctgccctcctggggttgctggggtgagtaaatgagacggggagtgtgtggggcttggtacagtgctgggtgcactgctggggtgtcccctggttttgctcccggagaggtggcagcgagcagaggtgtgtgctcttgcccagcttacgatggcagctctgtcaattcctcctcttcagtttgcacagcctagctcaggtgtgggcttctgttggactcgagcttctactcctggacaagaaattgcatttctgtaattaatttgaacattttttccatgtgacttttctgagctgctattgcatgccaggctccatgcttggacctgggagtatgcagtggtgagaaagattcccaggatctgcagccactctctagagacacctgctcctgctgggatggacccccttggatatggaggttggtcaagaagccgggggcccttctggagaccagggtgtggactgtggcccttggggctcgacattctgttgtatcactctcctggaggtggcagagctggacagaatcagacctcctggctcagcccttgttactagagtgcctgaagctctctaggccccagttttttcctctgtaaagaaggaatgaaaatcctgctcccgtaggcttgctgtgaggaggaaatgaaggggagagagtgggacagtgcaaagaagggacttcataagccataaatgggggctcacttccctactcccctcacccagcgttcctggcaggaaggacatctacccttgggaggaggagaggggacagtgttggtctgggcaggtatttcccatggttgcagccccaccccactggcattgatcatactattagtccagttgtctgcaccttcctcggagcccaagagcaactctggcatttccagggccttccggcggcctgtgatggatggctccaccgtccagtccatgcttgtgccaggcctgggcgggtgcggcatgtgatggatcagcccgaggatggtattttggaaggaaaattcaaattatattttaagataataccctgcctccccgcccccaccctacatcccatttgtaatctggcccaagaggttctggcaggaggtaacgagtttgtgatggatgggtaggcagccccattaggcctgcagatcctgcctcttaattaatattgatgtggctttaatttgggggcttagcaggcatgttttggtggcggggctctgtggggttgcagaggccctgggccatctgtgttgctcctagcatggcttggctgcctgggctggggtatccagccatgtccccatgctgttcttgcagagctcctggcctctgctgaccaccagccccatcttgagcagcatgatgtccctagacatggaattgggaagcaatgacacccattatttctggtgtttcagataggatagacattaatagcctcaagagcgcagataatagtaaaatgcagcaaaataattagggaatgatgaactttgtgtatttatcaattttgtttgttaatataatttaattataggtttatataatttaatccatactggctatgtttaataactggcttgcaaattcctgaaaatttaacaataggctctggcaaggtggtaggatgggctccagcccactgagtgtgtgtgagtgcaggtgagtgtgagcactggtgagctggaatacctgagcgtgtgtgtgtgagtgaatgtgtcagtcagggaggccttcctttgcacccagactcaggcatggggtggagtcccagatgccacctgacctggcacccactgggctcaggcacgggaagctctgtggcaccctggagctcaggcagagtgaggttcctctgcagaagtggcgtcaggaggcccacaatgaggggtggtggcatctgtgggccccttgctgtggcttcacttctggctctggttgccactgtcccttcaaagacaggttcccgaggaaacaaattaaacccgagtaaatatcagaaagtaattatgtaaattaaatacataatttaaagaacacttgtcatgaggtcagtggaaagctgtgaaggcagaagcctccctgtcagggctggcaaggcacaggcgggtgaggggtggcagccgcactggagaggatgggctgctgttccgagcagcctgcccctcacacgggctctgtcccaggtgcttcatgtctgtccttctgtgtgcccctcacagtggtcctacccctagacagcctcactctgcccaatttagaggcagtggctgaggctcagggagcttaagagccgtgcccaggccagagatggctacccatgagtccacctcccctgtggcaggccccaaagcccaggctctttctcccacaggggagccacagccctgccctgaagtggcctccctgagagctaggcagcatctgctccagctatgggggctctcgggcgcagagcggggcttcagggctcactccagtgcagtgtctccgttgctgtcatcctttctctgcctcagagacaggaggcagtgggcaggagtggtgggcttggcatggctgggccctaggccctggtctcagggttttctggcatccctcctgcccagaaatgccactgtggctatccttctgtgggcacacaaggtcccacacccctcatacccaaacagaaccacacacaggtctacagctgggctgttgggttccatgaggcctttgatcctgacatcctcttggtctggaatactccctctcttgtccatgcagaaaatgcctcttcatcctgcaagttccaactccccactctctgaaggctttcttgagaccttccctctgtctggagaaacaaaccccttctcgtgcactccctgctgttcctagtacatcctcaaacactgttttcttgtctgtttcctgttgggctcctttgaagttggggacagggtctgatccttctctctagtatccacgatagggcatggcctggttgggcaccagacataggcttggagcaagcctgagtgggtaagatagtgtggggcagtcccatcagcctgtcactgagagggtgggagttgtgggcagtgaccagggcagccccacacacattccccaccagcgcagatcccgagacactgctggtcccagggatcaggaggtcccattgggtgggtgggtgacagcccctgggtggccctcagacaggtctgcagagggggaacccgtcccaggttgcttccaggttaactcggttggggctgctctttctagtagaatgggctttactcagagtgataatttacagaactaatgaagatgctacatttcactgtgtaatgtcacttattaatactgattgcaaattaacagctggtaatggcatgcatcatgttttcctcttgccattcttaaatgccaaactccagcatttgaccagcctgctgcacggtctctctggagctctatatgcctgcggtggccactagataggtctggggtggggatgggagttgctgtgtcttggtgcacagagagcagagccctttatagtagacagatccagggttggatcccagctctgttctgagccagtgacttatctgtgaaatgggcatactctggtaattccctacaggtgctcaggctcagaggaaatgtgtgtgccaggcacctacctcagcattgcaaaccagaccattgcaaacatgatggggtttgcaaacctgcctccttctcatcccttcccacgtgccttcagcttgttggtgaataagactaaagagctctggctctggagtcagaggccctggatttgagcaccttcctaggctagataaactcgggcaagacatgagggtgtcatggggactaaatgagacagtatatgcaaattacttcacatagtgcctggctagaagtcagacctggataagacgtgctgtgtgctagtcagcttgggctgcattaacaagatacctcatgctggggggcttaaacaacacacatttaattttcacagtctggaggctgagaagtccaagatcaaggtgctggatctgacgtcttgtgagggcacttttcctggtttgcagttggccatcttctctcagtgtgcgcacctggtggagagaaaaagatctcgagtctcttattttcttataaggccactaattccaaccaggaggtctctgcccttataaccctaattacctcccaaaaccccctcttctaataccatcaccttgagggttaggattttaacacatgaattttgggggagcacaaacattcagtctgtagcatgctgttacgattacgccatcattggtttggccataccatggagagatgtcatctggctgtggcattaacaaaatccaaaggcatcagctttggagcccctggaaattcacatgtggctgtttggacaaacacttggaaattacttctctagatttgcttctctacttaaatgaaagaggaatccagaaaaatacccagagctccctcaaagcaatgatgtgggtcattcctctgtgttctgaaggaggagctcaacttctctggccttcagttttttcatctttcatggtatggttagccttcctcacaagccgcagagagggagaaaagaaatgaagcattgaagaatccagcagctcagggagagggcaccaagcacctgagggctggaggcgagcctctcactgggcgacttcagctggggtcttgctcctgccccgagaggcctgttgatgcaggaaagaagcttgtggggaaatgccatgccaattcctcatcctgaaaaaatggcatcaaagcagcaggactctgaaaaccatccctgcaaatcatagaggaagaactgctaaaatcattaccaaatacctcgtaagtgaaaggtgacaggaaaatcaaactttatttgtgaaaattctaaaaatcattagcatattatggattccttaaaaatatgatctcacttagctgatggaagggaattgcaaatcaaagggactatttattgcagtgggaacaagggacctgccagattaaaagaaaatattgaaggagccagagatttgaaacatgaaagacagtagcagataaacaccgcggaattttatccaaatactggaacccaacttggaacagaagttggtgaagaattattttataaacccattttcatcataacatgtgtaaaatgcaaatcttgataattatgtaaattagttacttggcataatttacttaattcaaagcacttaatgcagcgtggtgtgttttttcgaaagtgccagagtagacgtttattttaaattgtttttaatctcgatcttccagcctgattatttaaaatgtttttccctgtgtttgttttttaaatggaaaggagtagagcttggtgggaaattggaatgtggtgggattagccgaagccttccattgttagtgccccaggcagggggtgtgggtacggctcattcaaggtccctgtgtctgaaacagcacatgtgtgaacacaccatgtgaacgtgcccatacggagtcatccagaccacccattccctttcctgaatctgctcttatgtggttctgtggctggttctgaaacctgtctgagcagaaggctcctgggtactatcagcccttattagaggcagaaacttgtttcccctctcaaagagttttcaatgacagaccttccccttcaagccactttacaactttggaatttccattatcacagaagggagagatgacctttttagttttctattgtgtcacccgattgtcaggatggcacctcccttcttgatgagactctagaacaagagagatgatttgctcatttgagagcccttttgggggcgttccctgtgctgttgagaaggttggaagggagctgacagccgctgaacatctattttgcactgtgccagctgtgatgtatgccccttgctgaaggatctaaggtctcctaggaggaaggtggggttggctctgctttgcaggtgaggaaataggctcagagaggtggttgtccaggatcacccagatagtgaacccaggcttgtgcttattctgtgcacccctgggggagcagggcagtggggctgcttctccgtgccttttcctaatctctgaatctcagactaccatggaagatagtgttttcctttttttttgacaagtaaaagttgtattttttttgtggtatacaacatgttttgatgtatgcatacattgtggaatggctaactcaaggtaatcaacatatgcattatctcacatgcttatttttttgtggtgagaacacttaaaatcgagtctgttatgaattttcgaatatgcaatatattgttattaactatagtcaacatttatacaatagatcacttgaacttatcctcttgtctaattgaaatttcacctcctttgaccagcatctccccagtcccctaactccccagcttctggtaaccacctttctattctctatttctgagttcaactttttcacattccacttataagtgagatcatgcagtatttgtctttctaggtttggtttgtttcacttagcataatctgctccaggctcatgcacattgttgcaaatgacaggatttccttcttttcaaaggctgaagagcattccattgtgcatgtacaccacgttttcttcatccatccatcggctggtgaccaccaaggctgattccctgtcttggctattgcagagtgctgcaaggagtatgggagttttaatacaggctttattatgatttaggtatggcaaggccaatagattaggagatgactaccattgaaaagactgtttgttatacttgcagattcccagagaagagggcctgccttgccagcaggtcccacagggaggcagaaaggaggaggggggaaactatggtcaagagtcggctgtgctttccatggggaggaacaggtgaggcagagtaggtgggctaaggattggctggtgggagtaagcccagtgggctctggggcatagaggtgtccttggttgtctggtacctggccctggggtgattaggacaagtatatagtggccctgagtgtgagatcccaatataaaatgtggtcggggttctgggctctggattggttggtttgcagataaaaggcatgctctggagcaagttgtttactaacgcagggagagacaggccctccagggtaagtgaggccccagatgtcaaagcatcaaaaggtaaaagatataaggaaggtgtccagttttagtcttctgcatatggctagccagttaccccagctccacttagtgaatagggagtcctttccccattgcttgtttttgtcagctttgttgaagatcagatggttgtatgtgtgcagctttatttctgggccctcttttctgttccattggtttatgtgtctatttttgtaccagcaccatgctgttttggttactgtagcgttatagtatagtttgaagtcaagtatgtgatgcctccagcgttgttctttttgcttaggattgtcttggttcttctggcttttttggttccatatggtacactctgaaactaaaataaaagttaaataaaataaataagtacgtatctttggaaaaatgatatggttaatacagagggtagagctttttgtggtgagggatgggatgtcactctggaggacctcagggccaggcctgccatgactgttgtctggggagctgggattgtgatggggacaggagagccctccctcccagacaagacgctctcagatgagaccttgggcaagtagacttagagcagtagccctttgctgctgaatctggcaggacaccatcattctactcacctgaatgcagcccttgcctaggctctgggggaccttgtcaccctatgatgggggaggcctgcttccaattttaccaacagctgctggatgtgccatacctttgctgaattgcccctgggcctgcttggtgccccgctgacttccacagagagtcgcctgcatggatcgattgcagggacttcatttatttatgaagtactgtctgcaaatggaacacattctggcaataggaggtactcagtaagtggcagaagggagccactcctttcttcagggtcagcgtcagtcttaccctcaggacccagagctcctccaggacagggctgtgaagttttaaaattctgctgctctggaaccaagcatagggcctggcccaggacagtgttcaggaaatatatgaggaaggaaggaagagggcgggaagggaggaagaggaaatgcatagctgagaagctgaggtgtgaggtgtggggaggtgaggctccagatggattccagcgggcagagggcaagggtatccctgtgattggagccacagcaggtagttctttgggttcccttggaaatggcagacgctgctgccatcatacctgctccgcttgcaacaactatggtgacattaggagctggtggtgggaggggaatgtgcaatgaaagagaggaggctgggtagggctcttagaaatgaatttgaattatgggtaaagtacatctgggaagaaattcaaagcatatctttgggggctcaggtaagaaagaagtaaaaataaaaagtctatggaatcaaagttgtgtctcagcctttggaaaatttgccaataatccaaaaacacttttaactgtgaatttcttctgcgtgtgaggtggcagccttcatgtatatatatgtacattacagatggtaaaatattctctataagtactctcagtgcctgggcctttctcagaaattgaaaatagtaggggaagcaatttgaaatgtcttctttcgcttcaattacttttcagaaagaaagtattaaaaatacccagtgactatctgatttttttcagagggagtggagggatagtcacaattataaccttagattttgaaaaaattatttccccaacttcagttccttaccaagtagggctttgcctccaccggctacgtggtcatcgtgtggctgctgaagtcacgccgggcttcaggcaggttcccgctgtggttcaacttgattccataaacttttactgtttctgactctgttctaggcaccaagccttggggtttgataaagaacacaaatgaggaaggcctagctcctgttacccatatattatgatttaacgttattaatattgtttaatattattaaatttgaagggggcatgaatttcaacttgaggacctgagatggcctcagaggggaagtttgaactgggtcttgatggaggagtagggctctgtaaatttcaaattgggagcatcccagtggagggagggtgtgtgtgtgtgtgtgtgtgtgtatgtggaggatgtccaggagtgggcaaagagcttctttttctggatcccaaggtacatggtttgaggaggacgtggtggaggcaggtgatgaatgtaaaaacaaatagaaaatgctgttaggcatggtgaaaccccttctctacaaaaaatacaaaaatgagccgggcgtggtggcgggtgtctgtaatcccagctactccggaggctgaggcaagagaatcacttgaacctgggaggtggaggtttcagtgagctgagatcatgccactgcattccagcctgggcaacaagagcgagactctgtctcaaaaaaatgctgttaggaccacagtctcttaggtacccaaaatgtctggagtctattttgtgcacaataatgaagtctctagaagactttttgtttgcaacttgattgactgatgcttttgaggatattaatttcttggcaactgttacataaattgtgttatttgttgaaggtttagaggagggctgtattgtgagcagatatgatctcaagagagaacattcttgtggaatgtattagagggcagatgctagggtcaggggaccctgcaggacactgttgcatgagtcctagggaggaggtgatagtgctgaacctgagaagggagagtggaactcgggaaatgtttaggaggagaagttgaaaggcctccgccagtccaggatgtgggcttccttagcacatgtgtggtgatgctgttctcagacacgtgagaacagacatggcaggtggtaccagggggaaacctaggactagtgggagtgtgaccgggagcgtgtgaaggaggagaaggggagcgggtgggagcagaggggcatatgattgtgcctgcaagcccagggggagagggcattaggcaggactgcaggctggatgctggagaaccgtggaagacaaagaccgaggagggcccttgtttgttgatgactggcaggagctttagagcagagtcatggaggctgatgcagggggagagggcgagcggccgggatgtaccgggcaagcagggccaggtgtcagaaagctggtgtggaggcggggagggacctgtgtcctctcctccccatggatggtccctggtgcccactgaccctcagcttcctttcctggcagttccacagtccagccttgtcatggggcgagcaaggatcttcttcatttgatgtcaaagatgcatcattctggaactttctgtgtgctgttcccctctcctggaatgttcttcctaggggtttccagagctgcttctcctcaccgaggcagggtctttcctatcccaccctgaagtcccctcccatccagcatttattttctttggggctcttctcactgttggaaattatctccttgtctatcctgctattgatttgttctggcttgttctcagcctctgaaatgttaagttctgcgataaagaaccccaggggttcattcagttttgttttcctgtacccggggagagacagacacagagtgctcagtgagtactaggggaagaaggaacgggtgggtgctggcaggactccggcaggcttgggtattgagaaggcctggtgatggggcccctgagagcccaaagagggtgcagtgaggctggcaggcagagaggcgatgtcaaggcctgacctgggcaccgtcaccttgcattccttgcaggagtggactggcccatgcaccccgagctgcctcctttctctaaggcgcaggactcctctctagggagctcctccctgtccctgcagtgtccagtggccttttccagagtccatgcctctcctgggtgcctggagacctggtggctcttgcctttctcatgccctttctggatcaggttgatgcgaggcctgacaaggcctcagtcagcaaacttccccaggggcaggtggaggtgcgtgtggttggtggaagctgcattggtgatggtggatggggctggccagtgtgtacagggagcttgctggggaggccctgggacaaagtccagagctctgtgggagccaagggattctggggaaggggcactaactgtgtggcccagtgggggaagtcccagctctgttcattgtctacctgcttggggagttctctctgtgtgagcagcagcagcagacagtcaggttttttggggggatggggtagggtgggattacaaatttggtttcttgaagggagaaaaggactttgcgggagaagtggggttccgtggccccattcctggagagtggcaggagggctgcagcatgggcttgggctcctcactgttactctgcctccagccccaccccaagtgcagctggacagaagcttcagggaaaggaggctgagagttgaccttgtcagccaactggagcaggcagtggtagccaggggctgctgtccctcaggaacactggcttcagccagcatcactgatttcaggtgtgaggagccaccgctggcaaggagcataaactgtctctgatggatcgtaaaccctcagtcccattaggggctgctggaatagaagccagaaatgcagcagtgggaggtgcagaggagctctgagggcttatgtcctcccgtttgcatgttcttgtgtactcatgggtgccaagacagttgctacttgcccatggcatctcctattccctgaagaaataaaaccgtcctgtgggttgagatggttttaggtagagggagctcagggaagggactgaaggagacttttcccccagactgagaggactggccatgctggcatgaggcataaggtccctggggccacatgggtgtccctaccatactcatggactcatgcaagccctcatggtacacatgcttatgtaaacgtgcagaaaggtgtgctctgtagacatggccagtctctgccattttaaagacttgcagtggccttagaaggtgctgcaaggagcagaagcttgtaaatgacaggtctcagggtcccacctttatgcccatcctgcagctgtgctcggatctgtgtcacagtcaaggccatgggcagtgaggaccactggtgttctaaggaagaggcagggctgcagaagccacctgtgcacatgtggccttgccctggggctgactagcactcagccccgtgtggacagtgccacaggtaagctgtgacagggcagttttttaaggtaaaggcattgctttttcacttaacgttttcataagctataccagatgcaatgcatccaatgacctcgatctatcactttgttattgctgggaaacaaaccgtcccaaaacttagaacagcagtcatttattattttttatgagtctataggtcaactgggcagttctgctctgggctcgcttgtgcatctgagttcagctggcttgcagctggggatggctgcctgggtgcctgcctgactctcccctatgtgtccccacattcctccagcagctggcctggagatgttctcatggtggtggcatggttcaagagtggaaatggaaatgcacaaacactttttcaacctctgtttgcgtcaagtttactactgtcccatagtcaaagcgggtcacttggctgaggccggagctggagctggagctagaggagtcctcacagtgacagaacaaaaagcctgggattaggagcctttgccaggggcctgaaggcagccagtctcccatatttaggaatatcgtttacaccacactggttaaaggcggtttctccaggcagtaccaggcaataggactttctgtgatgatccatctcatatgagctatatctgtgctgtccaacatggtagccaccagccagatgtggctgttgagtacttgaaatgtagctagtgcacctgaggagctgagcatgtaattgtgtttctcttcaattaattgacgttttaatggccatatatggctagaggttgtgttatgtacagcctagatccagggagaaaccctcattggcacccgtggaaggctgttatgtgcccagcacagctgcccactgctggttttggtgtgggtggccgctgggtgctgagatgtcctccagctgatgatggacagatttgcattgtgctgtgctccagagagggcaggactggggctgataccagtgctggtgtttctggttggggctcctgagccatctctgcacacttgccctgctactccctctgattggttaagaagaggtctttatcttcttcaccttttctttcaagaagcttgggagctacagatccccatggccctgaacagactgatggagactgagttgcctctctgggaaccccaagggtgttgacagcctggggcttgtgtgttgggggcctggagcactggggcaggtgtaaggcaccatattgtcctcagttggctacctttcttcactttgggggagccctgtgctggccacttcatctcggccctggggctggctctccttcctgtctgacacagtgggcagagcaacaccgagacccttgttctttgtgaagccagtgggtttggtcacatggctgtgctccagggaccaggctgctgatggacaaggggctggctgaggtcatggttgggtgatcatgcatttgccatctctagagagcccccagggttctcatttgtatgctgctgtgccctccccatgcaccaacaggaggtgggctccccgtactcccaggtgcaggctcctgagacacaagcaggtggcctgcacaggaagtgtggttcttcagagtcccaggaaaatggtagttggtgattttcaccccattttacagacagcccctcaggctcaaaagggatagtgatttgcctgagggcttcagagactgtactgagtcctaagtgtcggagttcgtggcaggtgctgaggccctagtctagggctttccctttgtagtggtaaggggggccctgtgcacagcccccagcaccctcattacgatggccatggtgctctgctcttctccctcgcgctgcttggttccccatgatggctcctgtcacacagtccagctgggactacgcttagtggtgagcctgtcctcttggcacaacagggagcctgggactcctgcagcagcttgcatggcacttggcatgagtgtataccagaaagtttgcaaaattagtacagagagagttttggagagggacaggttaggaacaaaccctggtggaactaacactgtttatttggattttgttcttggtgactgcatgggccaggccgtgcctgtgggcatcccagggcatggggacagtgcagcttgtgggtctgggcagacctagagtatcctttggagggtgtgactcaggcacggctcttgcttatgggaggtggaatgcaaggatgggccagacacaagaaacatccaaggctgtgaaaaaatggcctgtggattgagactctgggctgcacgtgacccaccttaggcaaacaaaggcattcactggctcatggaactggaaagttcgggagaaacaggcttcagcctcacatgcacccaggggctgaaaatgacattgtcaggaccgtgtctcactctcagacccgcctgcctctgttcctgggcatgtctctttttgggaaagccaaatggcttctacaaggctgctgctaagagatgattttggcactggatgaaaaaactttagcaccctcaggcctcacaaggatagatttgtagcagtgtgcagtgcaactatattggcttccaggtcccttcttgttgaatcgtccatccctgggtggtttgtgccgacagacctctctcccagtgatcaccaacgtgccaggatgggctctctctgtacctccttgaaccccctgctcatccctgatccagtcaggatgtgggcttctgactggacttggagtgagagtcactccagctggaaacaggcaggaggaatgttttatcaaggaaaatcaggtccctaaagccagacagggtcccatgcctcagggctggggtgccatgatgcaggctggggtgccatgatacaggctgtgcgttggcaggattggtgcagggactgagggcttgcactgcctatctgctgaggccaggcccgctccagtcaggggcctcagctggccatggttggtctaggagcctcatgttgggagcagagggaggtgaaggggactggggatgctagggccagggactgccagcaaatgtgacctgaaggccagaattgccgtgattgggcccatatagggaaagaaagagagcttgtcatgaatcaagggcactttctggccatagaacctgttggatggcatccaacctgtagggggagacagtcagccagggctggacactggtgaacgctgctgggtctacgccggcgtcctccaacctctgtttacgggaatcactgaggctgacttggaccctcatttttcgtggtggcctgcatgggtggaacgtgttgcagttagacaccctcccgggtgcattcccacttaaagatgatttttcttttcctcctcttctctcactgctcagatatccgtgggcttcaaagctttctggaccaggcctcgcggctgggccttgacgtctctttacaaaaggtggacaagaacattagccacgtattcaccagcctcttcaccacgatgaagacagaggagctgaatcgctaccgggacacgcttcgccgcgccatcctgctgctcagcccacagggagcccactccttcatcaacgaggtaggtcatgggggcctgaggcctcaggggcctggtgcccagggctctgcagaagatggttcaggtgggctgcagggcacagtcgtcttacgcatggcctaaacggacatggagacccgtaggtgctcggcccacagcactcagcctgtaaggggggattctctgagcactacttggctcctgatagttccctgacaggtgagtcaaggcctgcccagcctctgaaaagctgtggggaggctggtggaagcctgtttacaagtcactgacagagatttctgaggcaagactcagcccttttttttttctttttaattttcctctctttgttgacaggtgtaagcctctagggataaaataaatttccagctttctgcagaggtgggtaggtctgccttgggatttcttagcacctggaggaggtgtctttgcctatcgttgaaggatacattagatgttcttatttttttggcacttgggctaataatcagtgtgaatttcttttaaaaacatctctgttcgaggttggagccttctaatgaagacagggcccatcagtttaagaatccattggttagtaaagaatccattcatttgtaaagaatccattaatttgagaagaaactagaaataacctatgagttggctgattggcgctggcccaggtagtctaatggcagagaggtgagaggctggagttggcaggtctccctctggcctgggttggttttggggggtgagctggggatgtggtatgcctgggagcagaggcagattgaacaggtcacagggtggccaagggctccctgcagattctccagacaaccccagtcaccttgttggccctctctgattgaaagtaaactgaagtgaaacatgacattatactaattccatttgatgtactttgcttgcttattctgcttttccttctaattaattattactcagaatgctacctcatgcatcaggagccagcccaaagcccactgctggggaacttaaaatttggaatgcttaatgtggtacaactggccggcagccctgatgctctctgctaatcaggccccgaatcacgccggtggtccgccaggctgtgatgtcctgtcggctcccggcattttcaccagaacatgttgccctgtatgaagtgattcagtccagtaatggacagcctgggattagcagcactaacatgtccattctttctcagaatatacccagctgtgtgtttgcaaaagtctgctcaggggatggctcttcttgcagtatttccccagctggattctgtactggtgatggtatcgactaatctcatcgctggccccctcccttcttgcttcttgccaattccttgcccgttccccttgcttcctttccttcttgctctgctgtgaagcttgggggtggaaagactattggctttggagttgaatggatgtgggggcaagtcccagctccttgacttattatttgtgtgaccttgggccatttgcatcaccgtcttagcctctgtttcttcatctgttaaaagggatgaaggagacagctatgataaagcatttagcatatagcttttcaagaagcatctgttttcttttcactgcacatattcatgcattttcgttctagaggattttagccccttcctgtttctagccctgtgaggatttaacacataactaagactggcctaaggatgttattgccaagtggttaattatgcaaacgcctgcagtggtggattcgctgggcttgctttgtcctgcttgcattgctgggtgtgatgggaatggggaaggctctggggtggccacttttttttttgtcagaccattattttatttttaaatttcaacttttattttaggtacagggggtacatgtgcagatttgttacatgggaatcttgtgtgatgctgaggtttagagtacggatcccatcacctaggtggtgagaatagtatccaataggtcatttctaaatcccccaccctctagtattctacagtttcttttgctggactcttaacgtcagtcaagtccctgggattgttggcaggagattgaggggaacgatggcatttggactttgggccaacagctcccaccgtagtcttcagtctccgccgatgataagagtcttgatccctgttctcatgcgcctgtcattagtagggaggaagctgaggtttcttgggtgcccacgatggctctggccctttgtgcattctctaatcctcacactttgcagacagaggaaatggaaaagctaaagatgttaaatgacttacttaaggtcacacaaatagccacttaggcattgaacaggattcaagtccggattttactccctccagagcccctctcttccatctgtgatgattccaggaatatcagtgtacagcactgcacttgctggagtggggaaatagggcatgctggcttcatcggggaagatatggttccactgtctctggccagggtttggcagaggttctcagggtgcttatacgcaaagcattttaacgtatctcctaagtgtggtggggaagaaatgtggattctggagtaaacatgagctatctgactggctagcccagtaggtcccctaggaacacctgggaatgctgtccctgcacgaagccttcctcaccacctggaggcattgcatgggcttcttgagcagactgacccaacctcctctttgttgtgacaaggacaaacgatgttcacaaggatgacacactgccagaacatgtcctgaattttatgaagcccaaagcacagttaaggaggagtaaatgtctcctcagcacccccaacacatcaactgcatgtcaatgttatgcagcatccgggatggtacagatgagctggagttggcatgggctatggggctttcctagttgtaagttctcctcttccctactcaaaaagcctagccaaatgggagtgagtgaggaagacggagctgcttgaatcttttacattttgcaaaatggcattcattcactgaaggtggctgttggcctgggggcacatggcaccaccagcctctctgtgattccgcttcacgaggggctctgctgtcggggcctgcaggttctgtgagcctggccttggcagtgagtgggtgagtggaagagttgtggcaggccaaggtgctggggcctgcctggggaccctgtgggcttgtgtgtcaggccccacctagagacccctcacatccctcgctcagtctttattccacattcatcctctgaggcctcctcagcaccatcttagtagccaccacaacactgcatcatcttaaaaaggtgtggagaggctcccctcagggaggatggggctgagggtgatagaactcaggtctccggatcccaggcctgggggcaccatggggctgctctggggactgccaagggtacaggccatggaatgtcccttcctccaggggggcctgttctgccttgagcttgaccttggagccctccatgtgagtgtgggtggctctttccaatcataccctaactggggagtggattggactcattggatcctagttgggccttggttcttctctgggctacaggttgctaagtgggacttcagtgcacagtgacaactacctatgatgttctcctcatgcaagcccatcagcttcctcaccagctggggatcatggcccatgcaattgctgaagtgaccaaggcagcagctgctgagaggggccttgctctgggaatcctgctggtggctgctggagctttctctcttctgctcatggctcttcctgtcacttctccagcatttactgagccccagcctgtgccaagttctatgtgggcatgtaggctgttgtccctgctctcacagggctcccagcttggtggggaggactgaggtatgaacagacccttttacctgtaatggcagaggtgtggccaagtcttgtaagagcacggaagacagagtgatgtcctctggccagggagagatgggatcatcagaaggtcaacggaagcttcctggactaggtgactctgggtctgggtctgtaggaatgaacttgcactaactctgtgaacaaggaagggctggagagaggggtcaggggatccctactgtattcaggaacttgtgtgtgatgcagttgcagtcatgggtgtgcaggggagggagtggctggagctgaggctgggatgtcagcagggagggctccctagcctggggcaggaaatccagacttcaggactgatgtgttcttggggtccttttcagggtgttagaggttaacgccctacagtttacatgtcttattgttgttcttctccaggtcaggcttgatggggagaactccagtccacagtcatttggccctgggcttcatctcaacttcctggagggattctgttcatctattcatctgtcatccacctctctctccgttcatccattcatctgtccatctactcatccatcatccaatcacttactcacccagcaagtaccaattgggagcctcctatggatgaggaaccctatcaaatgctgaggggcatggaattcagaggcagtgcctcctcctctccaagactggctatgatatggaaagtcgtggccacacaccatgccactggtgggcattccagtggctggcagagcagctgtgccccagggctgtcatccactaaggcctctctcagtgtccatgggcattttgaggactccagggctttgtcctttcacctcttatttattggttctatgccactgtctctaccatacataggcctccctctttccttttgtttcctctgtatttcctcctctcccttctagtcttttgttccactggaaagagtggaaaaattaaatgattttaaactgtttgttttctttatggagaagagttgctgctccttctttccagttcacaaggaggcggggcagcctgcccagccctgatgtccaggcaccatccgtttctgtatgtcctgcagatgttggataatctgtccctgtaactagaacgtgctgcctgtaggccagggactgtgtgatgttcaccattttatttcctgagagcagcatgggaccttgtctacagtagtgttgaaggactaaatgaatgggaatttaatatttcttacttccaatagaaatggggtcagctgtttttgtgtgtgtgtactttggttgcctgtttggctggtaaacaactcctaggccagcacatcagcaagggctttggtctgaaaactttggctagtgggaaggcttacatttgcctaagagtgctgccttaggcctgggtggctcagcaaatgaggccagggctgctcctgcaggtgggacgttcctgggcccagctgtggcacatggcagtggagtgtggggtgcagagagatcagcgtgtgtggtggtggtaagcagcagtggagaaaggtgtgggagaccaggcatgcatttgtgcacacacacacacacatgcacacatggacacagcttgatgcaatgatacaaccagcagccacatacactggtacaaccagaccctcagactggcacagcccaacaggcactgacacacacacaaacacatgcacctgtgcagatccacacatcaatatgcatacacatccaccaggaggagagcattgctggtggcagaacagtctgggagaggtattctgtctttggaaaagaaatggcagctacccagtgacagttgcagcagatggcattgacctctgcagttagataccagtgatctctttctgtagagggaagaacaggagaaagaacagcagagagaaaagctggttagttggacagctttccgttgctctggtacaagatgtcacttttcatccaggctggatggagttaggttaaggaaaaaggtggaaggggccactcccaacacctctcccagattggcttcccaggcatggagtgtgcctggaggtcaatttgatccttcatagaagcccagcctgggtttagtcctgtcttcaaatcaattgcttctcagagtttgctgcagtgagtgaagctcccgcaatttgaatataaagactgtgctttttaatacatttatagcaaaggtaaattagcaatctcaacgttctgttgtcccacatgatatatgcaaatatttctcactctaacaaggtaaatctttagcagacgactttatcactcagagctaggataattctgtgccatttaagtatcatttaccagaatattttaaattactaattaattataggagattaatttttgaatatggccctgcatttgcatttaattatatcccactgtttacagattttaaagccttagcactttagcaaaagtgcttccagtctgagaaatttacattttctcttagaaattcttagaaataaggtcacaagaaagaaatgtttctagattttgttcagatgggcttggaactcagcggcttcaagaggcagccagaacgcggggcctggctgagttcaggaagggaacagagagctgtcctgttaggatctgtgtttgaggctctacatggctctgtccctttcctcctctgtccccaccatcctgctcatctttccaaagcccctgagtgctggggaagctgctgtgagctctgtcccggtgtcagccagcactggtcttgcaggcctctggcatcctagtccactgtcccctctccatgacagcactgtcacatccctcagagcctgctgcctcctgaacacacctccattgccacctcatcccagagctagccctgcacccactgcttgtgctgtgaccctctattgcatctccctccttgtgtgatctgggaatgctaagggcaggaactggggcctgttaatctttcttaatcacattttcaggggccatgcattatggttggtaaacagatggagggtgggaccccaggagcaccgacttctgtccccacacaaacgttgtctagaacttcgattgcccactgggcaaatgaaacacattcttaacactccagccaagcaggagtgcccaagtaaaacattgtaagaatttaatgtttgatttttgatatttcaaaggagcatctaagcaatcatcaggggaaaaaggcctgagtgccgctggactttctggtgtttattttctggttggctgttgtttctattttgagttccatctcaaatcatgccatcccattcttggtgctctggggtgctgaaagccttacagagactgtctgggaggcctgtctggggtcaaagagaactgtgaacctgaagcatgggcctgaagacacctggtggcctttccttcctttgtgggtcattaaatagcggagcagagtgtcagctcctccctgcagagtatctatggcttattagcaggtagcccctttggccaaggaggcagcagacatgagaaataggcatttacaaagggaaacagcctgcagcagccgaaatggctcaattaccctttctgctcccggatccccaagggtgttcagccttgggggggcctcgcctctgagcctgaggtgagtcagcctgcttgttgactgaagagctgattggggagctcagcggggaagctgtaagaagacgtggtgggatgcagggggagggggcgggtcatgagaggcagaaatgagagagattatctaaattggtatgaatttatctcagagaagctatctgtgccatgtagtccacatctggtgccattctctgcacatggcatccctaaacagagccctctcctggtgccggtgagataagagagttctctgaccccactcgcaggacgtgtgatagggacgtggctcctttgtttggctgcttgctccttacgggatggggggcacgcagacgggcaggtgcaggaactggggtgagcgcttttgggctctggccccacggtagcactaggggtgggtgcctgtgactcccaaagccccagtgggcatgttacagtgctcttttagctcctgccatctgcagatggcttaagcgttaaccagctcagcgccctcttggtactcagatccttgtctggcaaccaggaagaatcaggtcacacagacaagttaaaggatggtaaatgcaggggattttattgccagatggaagtggctctcagtaggatggatggggagctggaaaggggttggagtgggaagactatattcccctggaattctaccatcctgcagctgatcttctctctgaccgtctccaaccgaactcctctcgacattcagatgctccttctctcctctccttctctactgtgtcgctcttctgttcctctgcccttctgcttatggagcctgggatttggggtttatatgggtacaggcatggcaggccaaaaggcaacatttgtgtgtgaaaacaggaatgactgttcccatttagggctgtgagtttccaggcttgagggtggagcctttgctggggaacttccctcttctacccagtatttcctggcctcctgtctacatcactggtaggaatctggccttggtcacctgccatctgtgcttgagctgccagtccccttggagagaagaagggctctgcatcagctagctgtgtgcagtgtaacaaaccgtcctaaaactcagtgtcatgcaacagtaagcatgtgttgttactcatgaacctagtggtcagcagacctgggttagattcactggatctcagctgggctggctcatgcatctgggctggctggtgaggatggcactggccagctgtaagctggggtgatgagcctgccccttgacaagcacactagcccaggcttattcatgtggcagcagcggagttccaggagaccaagtgtgagtgctcagggctgcttgaagcctgagctcagacctggtgcattgtgacttctactgcaatctcttgtccagagcaagccatgaagtcagctcaacaggcaggggaaagagactcctcctctagatggaagactgctcttgaggggggaactggaaagtcacattgccaagggagtggctgccttgaaggacagagagttgggaccattttgttgtccatctagcataggccctagtgtgcagatgagcttcctgggtggaagcagatggtggcagttctgcaggtgacctggggccatgtgccttctcactcttactttgcttcaacattgttcaactttggggtgaacatggtaaagagggggatgtggagcagagggagggatgaagacaggctttatttatcaagttcaccatattcagaccctgaaactcaccgaatcttctcaacaatgctggaagagaagggctaggatggagctttgagcctgtggggattttggggtttgctcatggtctaaaagatgaaaaatgacagagctgggctatgaatgctgaacaccctgactcaaagcccagcttttttctactatgtgctgttgggagaggaggcttgttgccattgacagatcaagggagagcccatttttctcctggagtgtgacacagagcagactaggtgaacattgccacggagtagcaggtagcatgaggagggggactggacacctctgaatgctcatatggagatggggacaacccccagtcctctctcggccaacacatctgcagagagcctgaggggatggattggctgcctctgtgtctccatggtcaactagaagagcagtttctacaacctcccaggcacccgagagtctgaggacattttatataggctttctgtctacagggcagggaagggcagagtccaggcagacccagcccctttcttgccccgctttctcaccatgtggctttctgagctctggttcctcatctgctcaatggagtcaatacttgattcacaacgttcttctaagtacagggtattttggggtgtaggctttcctttttcctttctcacagtgcttgacatgggtatgggtacccagaacatgcccagtgactgatgtgtgagtggggagatcgatgagtctcagaaaatgtaaagatatgggcatgaagggcgttgagaaaagtgaaaaaatcttctgtgaccctgggcaaggtcaacattctgaagtttgggatgtgctagtgcttgacatcagggattgggctggtgacctgctgctaggtcggtggacctaggagagaagtggcaaggttggtgggccgttaccaggcgtgtgtatgcttcacctccctgttgcctgctgtgcagggcgtggtatggcctctccctctccccagtgcattactcacatatctgcactatcaccaaagtatgctgtgagcagtgtcagggggaaagcaatgtacagggttgtggtccacagttcgagtcatggagcctgggggaaaggagctgctgtaggagacaagtgtgaaggtaggggagaaaagaactggagggaggtagatcatcacaggaaaagcacacatgaattcccccaaccccatccaagaagccctgggtacatgggcacagggagggcagatggagggtttcctaccccagggagatgcaggacttgaaccacttcgatttaaataagaaaaggcagggcagagcacccaaggatgtccctctcctcccacacccattctgcccattctcctctcacagaggaaacctgaggctttcagatgctcagctggggccacgatgatgcttttctttccagggctggggctgctggtggcacagaggaaggggcattgtccttggagcaaatggacacagaatcagagcccaactcttctatcagtgccatctttttgaggctatttactggtcataagctggagtattaacaccttcccagagggttgccatgggaattaaatgagggaatgctcttgagagggcctggtgcaggggtggtgctctgcaaatcgtagtttcattattgtgcctgtggatggtgtttggctgagattgtagaaccaatctggggctgttggggtcaaacattgggaggtatcagtggctcagagatggggagctgtggccagcctggcagaaggatagctcccactcactctgtgtcaggaagcatagctcacagagccaagtgaggaaagccagatgtggggtgcacctcgggtggtaaggaggggctaggaaaaagtgacaaagtgctcacgatctccagccagcccagctggggttgagaaccagcttgtggtccagcactcagctggagaggatgttagagtccaagagagagggggagaagaggagggctaagtgctgcctgggctccagatgctggctaggcactttcggatctttttcaggagcagggtgagagttcacagggcacctcccatctgggctgttattggagcacatgagcaggagcagctactagtggcttctcaggagtgctagttactgggctgatagaaggagggacagccgcgggtgctttctgcctgcagagttactcttcagatgagaaggcatctctcagcagcctgtcggtggccagtacgccactaagatagaatgggctccatccctggacctcttacactgggtgctttgggggagaaagacatggtctctgcccctgaagcaccgccagactacactagagagagaaaacatacactcaggaagaacagcgactactcagttggagactgccctgtgcctagcgaagcagggtgggaagggggccgcatagcttccccttctctctgccctataatgatcaaatgggaccatcccatccaggctaccacatgaactactcttggataattctgtaacttggagcttgttaagacaatcaaagggtcagagaagaatggctaaagccaccctttggcgtgacagccaggtcataaatccaaatgcctatggcatccaggcagggatattaaggcagacagcaggtgggctgtaagaactgagagtattgcagctgcaggcacctgggggaaacatccttctctgaagaggactgtcaggctctgccaagattcccctgagaaggcctggtgtggtcactatttcttgtgtctcaagaggagccagaaatttggacttcctgtgaaatctcttagtttttaaatgtttgtagctaattacaaaaattctgaactctttgttggccaactctgcctgtggcagggctgataaggcttgcaggctgccaagtggtaatgtctgatttattgcatatatactgtcaacttaagctcattaactatgagaatagtgtgaagccagccctgttctcctttcccagttctttcttgctgaggataggcagtcattcttagcacagtggtcctaggagttcctatttcttttctttttcttttttttgtttttgagacggagtctcactctgtcgcccaggctggagtgcagaggcacgatctcagctcgctgcaacctctgcccctccaggtttaagcaattctctgcctcagcctctggagtagctgggattacaggcgcgtgccaccacgcctggctaattttttgtatttttagtagagacggggtttcgctatcttggccaggctgatcttgaactgccgacctcatgatccacccgccttggcctcccaaagtgctgggattacaggcgtgagccaccacgcccggccgagttcctgtttctttccttggctcctcaaggtaccacccctgttttctgtgattccaacatccttcttacttttgttggtgggtgtgacctgccttaggggtctccctcatgcagttgacccttgaacaatgtggagattaggggaaccaaccccccatgcagtcaaaaatctgtgtataacttttgactcccccaaaacttaactcctaaagcttactgttggccagaagccttaccgataacataaacatttgatcaacacaaattttgtatgttataggtattatatactatattcttacggtaaagtagagaaaatggaattaagaaaatcataggaagagaaaatatatttactactcattaagtggaagcggctcatnnnnnnnnnnnnnnnnnnnngtcttgctgtctcatgggtggccgaggcggaagagatggaggagggaataaggggaggaaggagaggcagtcacattcagtgaaacattgattgaaaaaaatccacaggtaagtggagcctcacagttccaatctgtgttgttcaagagtcaactgtagttgccagaagctcatgttctttttatccaccattgctcaaattctactctaaatgtgaactgagctctttaaccattacaggcacttttggtctttcctgtgtgaaggccagctctttagatgggtggtgatcattggtattggtttgctctacctagcagtactccacaaggctgctgctggttgttaactatcctgggactggcagctttcagttcgtgggtcttatagctttttcctttctgcatttggggcacactgactctgccggttcactctctgtgctgaggtggggagggtttcggcctgcctgaccgttagcatgagaagtagcttcctatttagggcctgagtggcaaagccttgcccattggcagtcacgtggaagccatggtgcttttatgttcgactgccagattgtcttcctccagtccttgctgtgggtgcagcacgtccagggagcctgtccatgccagtgctcaggcattactgcattgggctgtggcctcaattttcatgtttttctaaaaccatgtctcacttgcagggagggaccaacctcatcttatgattgctccctgaagttcactgaaagggctatgcagagtagatgctcagcaagtcactggctgtatcagccaggcccggagggaactgcccagttccccatatcacacccaggggctctccagagcctgggactaaggtttccataagctcccgccctggctctgtccagttccctgtatgactatagggcactgtcttgcctttctgggtttcatttgtctgtcttgaaatggattcgatattaattgggcagtgaatatggactaggctctgttctagaccctgagaatataaagggactgagacaaacaaggtccttgtcttcaagagctgacatcttagtggaggtggtggtcagacactaaacaaataaatgagtaaaccaaaagtcatgtgggtagtgacaacccccatgaagaaaaatacagtaaggtaagaagagagtggtttcgtgggggcaccactgtagagcagtggttagggacaatgatgccaagaagtaggcgtttattgagagactggaaggatgtgatggagcccccaaaacaagatctgctgcagagagattgtggcatctggaatgtcannnnnnnnnnnnnnnnnnnnnnnnnnnnnnnnnnnnnnnnnnnnnnnnnnnnnnnnnnnnnnnnnnnnnnnnnnnnnnnnnnnnnnnnnnnnnnnnnnnnnnnnnnnnnnnnnnnnnnnnnnnnnnnnngtgagccagggggagagtggtggcaggtgacattgggcaggtgtccaagatcaaagcactgggggctttcaggcctttgtcagattttgggtttggtttcagttgaataggaagtcactggaggtttgtgagcaggtgagcagcatgatctggaaagggaccagggttaaggtgttgtctctgccactctctgactccatgggaagcagctcagggacacagaaatcctaagggaattgtactctatagttgtcagctgacagggagcctgggagctgagaatggctaccctggggaggtgctccctctgtttccctgcttgcctgggccacgaggcctggatgggtagctccctgcctggcagcctcattctgggctccctgcactcaggccgcctgcatgggcccttggtgtgggaagccacgctggctcctgctttgtgcctcacagagcaagttcgcaggggtgagctcagcctcatggcagccaccatggcagcttcctgtgaggagcaagcaatcagcctaaagagctttgcacattattaatgtgtgtgcacatgggcctgccttgctgctccaaggactctccttgtggaagggctgagagaggacgtgccccttttcagtgcatctttcctctttctttcagcagggaattcggagaagcagcaaaagcaacagcaataacaaaccccaaccacacaaaccttccgctcatcacctaatgagaatcaggcagggctgctaccaagcccagtgcagggcctcgcctccccagggctgcgatttgtttgcccttgtgccaataggtaaacaaatcagggatgccagtgtgtggacatgtgtgggtgtgggggtgggtgcagagtttgcatgtgttccacctttgtctgcctgtttccacactggcctttgaaactgtgtgatgcccctacctccaccataaaggactcactgacattgtgggagatagtgatatgggacatcccacaccacatcccattctttgttgctcccaactgcttcccctccactctcagcatcaccggtaggttccaggctatggccctctgccctctgttccctaggtttggattgtagctttgcctttaggacaaggtggtcttgagtaggtcccccttctcctcctgtgacccagtagactccaatcctccccaccgttcattccagatcccccggggcactggcagtgttggggcggagtagtcaggcctggcattgcacggaaccaaaatcatgacatgacttgattcaaaactcaagcagttgcctggttcatcctcaaagctgggcacctttcagagcctttgcaatgatgcttgggtcccttggttctgctgccatggctctgaagtcctgtgtccctggactctggacttgagcactgcccaggcctgcacggcagggcactaagctgcagaaagtggggcccaacagttccaactgggctccccccttgtctccacccctccctcatgtgtgctcacacgtcaggggtggccctcagggtcagtcccatcagaggtagcagctgtggtccaggcatactgggagacttcagaggccagttaaaaggtgaggaaaaaataaatttatctgtgaaatggggaacactatttgcacatttaattcagtgaccaatttaaaaaatcatgactgtttctttctatgaggggcagtgtcctttcaaatctggctacttttagcttccaaaggaagataggtaaagggaagttgtataagttatccaggcacccagtggagctccagtgctagggagaggctgagcaggaattccagctccagggctgctcattcctcttccagctgttgggtatttcttcctacgcataaggggccatgcccaggatggccgtcagcccctggaaatgcaaagcaagcacataccctggctcattaattgctctaagtgaatgtgcagggaannnnnnnnnnnnnnnnnnnnnnnnnnnnnnnnnnnnnnnnnnnnnnnnnnnnnnnnnnnnnnnnnnnnnnnnnnnnnnnnnnnnnnnnnnnnnnnnnnnnnnnnnnnnnnnnnnnnnnnnnnnnnnnnnnnnnnnnnnnnnnnnnnnnnnnnnnnnnnnnnnnnnnnnnnnnnnnnnnnnnnnnnnnnnnnnnnnnnnnnnnnnnnnnnnnnnnnnnnnnnnnnnnnnnnnnnnnnnnnnnnnnnnnnnnnnnnnnnnnnnnnnnnnnnnnnnnnnnnnnnnnnnnnnnnnnnnnnnnnnnnnnnnnnnnnnnnnnnnnnnnnnnnnnnnnnnnnnnnnnnnnnnnnnnnnnnnnnnnnnnnnnnnnnnnnnnnnnnnnnnnnnnnnnnnnnnnnnnnnnnnnnnnnnnnnnnnnnnnnnnnnnnnnnnnnnnnnnnnnnnnnnnnnnnnnnnnnnnnnnnnnnnnnnnnnnnnnnnnnnnnnnnnnnnnnnnnnnnnnnnnnnnnnnnnnnnnnnnnnnnnnnnnnnnnnnnnnnnnnnnnnnnnnnnnnnnnnnnnnnnnnnnnnnnnnnnnnnnnnnnnnnnnnnnnnnnnnnnnnnnnnnnnnnnnnnnnnnnnnnnnnnnnnnnnnnnnnnnnnnnnnnnnnnnnnnnnnnnnnnnnnnnnnnnnnnnnnnnnnnnnnnnnnnnnnnnnnnnnnnnnnnnnnnnnnnnnnnnnnnnnnnnnnnnnnnnnnnnnnnnnnnnnnnnnnnnnnnnnnnnnnnnnnnnnnnnnnnnnnnnnnnnnnnnnnnnnnnnnnnnnnnnnnnnnnnnnnnnnnnnnnnnnnnnnnnnnnnnnnnnnnnnnnnnnnnnnnnnnnnnnnnnnnnnnnnnnnnnnnnnnnnnnnnnnnnnnnnnnnnnnnnnnnnnnnnnnnnnnnnnnnnnnnnnnnnnnnnnnnnnnnnnnnnnnnnnnnnnnnnnnnnnnnnnnnnnnnnnnnnnnnnnnnnnnnnnnnnnnnnnnnnnnnnnnnnnnnnnnnnnnnnnnnnnnnnnnnnnnnnnnnnnnnnnnnnnnnnnnnnnnnnnnnnnnnnnnnnnnnnnnnnnnnnnnnnnnnnnnnnnnnnnnnnnnnnnnnnnnnnnnnnnnnnnnnnnnnnnnnnnnnnnnnnnnnnnnnnnnnnnnnnnnnnnnnnnnnnnnnnnnnnnnnnnnnnnnnnnnnnnnnnnnnnnnnnnnnnnnnnnnnnnnnnnnnnnnnnnnnnnnnnnnnnnnnnnnnnnnnnnnnnnnnnnnnnnnnnnnnnnnnnnnnnnnnnnnnnnnnnnnnnnnnnnnnnnnnnnnnnnnnnnnnnnnnnnnnnnnnnnnnnnnnnnnnnnnnnnnnnnnnnnnnnnnnnnnnnnnnnnnnnnnnnnnnnnnnnnnnnnnnnnnnnnnnnnnnnnnnnnnnnnnnnnnnnnnnnnnnnnnnnnnnnnnnnnnnnnnnnnnnnnnnnnnnnnnnnnnnnnnnnnnnnnnnnnnnnnnnnnnnnnnnnnnnnnnnnnnnnnnnnnnnnnnnnnnnnnnnnnnnnnnnnnnnnnnnnnnnnnnnnnnnnnnnnnnnnnnnnnnnnnnnnnnnnnnnnnnnnnnnnnnnnnnnnnnnnnnnnnnnnnnnnnnnnnnnnnnnnnnnnnnnnnnnnnnnnnnnnnnnnnnnnnnnnnnnnnnnnnnnnnnnnnnnnnnnnnnnnnnnnnnnnnnnnnnnnnnnnnnnnnnnnnnnnnnnnnnnnnnnnnnnnnnnnnnnnnnnnnnnnnnnnnnnnnnnnnnnnnnnnnnnnnnnnnnnnnnnnnnnnnnnnnnnnnnnnnnnnnnnnnnnnnnnnnnnnnnnnnnnnnnnnnnnnnnnnnnnnnnnnnnnnnnnnnnnnnnnnnnnnnnnnnnnnnnnnnnnnnnnnnnnnnnnnnnnnnnnnnnnnnnnnnnnnnnnnnnnnnnnnnnnnnnnnnnnnnnnnnnnnnnnnnnnnnnnnnnnnnnnnnnnnnnnnnnnnnnnnnnnnnnnnnnnnnnnnnnnnnnnnnnnnnnnnnnnnnnnnnnnnnnnnnnnnnnnnnnnnnnnnnnnnnnnnnnnnnnnnnnnnnnnnnnnnnnnnnnnnnnnnnnnnnnnnnnnnnnnnnnnnnnnnnnnnnnnnnnnnnnnnnnnnnnnnnnnnnnnnnnnnnnnnnnnnnnnnnnnnnnnnnnnnnnnnnnnnnnnnnnnnnnnnnnnnnnnnnnnnnnnnnnnnnnnnnnnnnnnnnnnnnnnnnnnnnnnnnnnnnnnnnnnnnnnnnnnnnnnnnnnnnnnnnnnnnnnnnnnnnnnnnnnnnnnnnnnnnnnnnnnnnnnnnnnnnnnnnnnnnnnnnnnnnnnnnnnnnnnnnnnnnnnnnnnnnnnnnnnnnnnnnnnnnnnnnnnnnnnnnnnnnnnnnnnnnnnnnnnnnnnnnnnnnnnnnnnnnnnnnnnnnnnnnnnnnnnnnnnnnnnnnnnnnnnnnnnnnnnnnnnnnnnnnnnnnnnnnnnnnnnnnnnnnnnnnnnnnnnnnnnnnnnnnnnnnnnnnnnnnnnnnnnnnnnnnnnnnnnnnnnnnnnnnnnnnnnnnnnnnnnnnnnnnnnnnnnnnnnnnnnnnnnnnnnnnnnnnnnnnnnnnnnnnnnnnnnnnnnnnnnnnnnnnnnnnnnnnnnnnnnnnnnnnnnnnnnnnnnnnnnnnnnnnnnnnnnnnnnnnnnnnnnnnnnnnnnnnnnnnnnnnnnnnnnnnnnnnnnnnnnnnnnnnnnnnnnnnnnnnnnnnnnnnnnnnnnnnnnnnnnnnnnnnnnnnnnnnnnnnnnnnnnnnnnnnnnnnnnnnnnnnnnnnnnnnnnnnnnnnnnnnnnnnnnnnnnnnnnnnnnnnnnnnnnnnnnnnnnnnnnnnnnnnnnnnnnnnnnnnnnnnnnnnnnnnnnnnnnnnnnnnnnnnnnnnnnnnnnnnnnnnnnnnnnnnnnnnnnnnnnnnnnnnnnnnnnnnnnnnnnnnnnnnnnnnnnnnnnnnnnnnnnnnnnnnnnnnnnnnnnnnnnnnnnnnnnnnnnnnnnnnnnnnnnnnnnnnnnnnnnnnnnnnnnnnnnnnnnnnnnnnnnnnnnnnnnnnnnnnnnnnnnnnnnnnnnnnnnnnnnnnnnnnnnnnnnnnnnnnnnnnnnnnnnnnnnnnnnnnnnnnnnnnnnnnnnnnnnnnnnnnnnnnnnnnnnnnnnnnnnnnnnnnnnnnnnnnnnnnnnnnnnnnnnnnnnnnnnnnnnnnnnnnnnnnnnnnnnnnnnnnnnnnnnnnnnnnnnnnnnnnnnnnnnnnnnnnnnnnnnnnnnnnnnnnnnnnnnnnnnnnnnnnnnnnnnnnnnnnnnnnnnnnnnnnnnnnnnnnnnnnnnnnnnnnnnnnnnnnnnnnnnnnnnnnnnnnnnnnnnnnnnnnnnnnnnnnnnnnnnnnnnnnnnnnnnnnnnnnnnnnnnnnnnnnnnnnnnnnnnnnnnnnnnnnnnnnnnnnnnnnnnnnnnnnnnnnnnnnnnnnnnnnnnnnnnnnnnnnnnnnnnnnnnnnnnnnnnnnnnnnnnnnnnnnnnnnnnnnnnnnnnnnnnnnnnnnnnnnnnnnnnnnnnnnnnnnnnnnnnnnnnnnnnnnnnnnnnnnnnnnnnnnnnnnnnnnnnnnnnnnnnnnnnnnnnnnnnnnnnnnnnnnnnnnnnnnnnnnnnnnnnnnnnnnnnnnnnnnnnnnnnnnnnnnnnnnnnnnnnnnnnnnnnnnnnnnnnnnnnnnnnnnnnnnnnnnnnnnnnnnnnnnnnnnnnnnnnnnnnnnnnnnnnnnnnnnnnnnnnnnnnnnnnnnnnnnnnnnnnnnnnnnnnnnnnnnnnnnnnnnnnnnnnnnnnnnnnnnnnnnnnnnnnnnnnnnnnnnnnnnnnnnnnnnnnnnnnnnnnnnnnnnnnnnnnnnnnnnnnnnnnnnnnnnnnnnnnnnnnnnnnnnnnnnnnnnnnnnnnnnnnnnnnnnnnnnnnnnnnnnnnnnnnnnnnnnnnnnnnnnnnnnnnnnnnnnnnnnnnnnnnnnnnnnnnnnnnnnnnnnnnnnnnnnnnnnnnnnnnnnnnnnnnnnnnnnnnnnnnnnnnnnnnnnnnnnnnnnnnnnnnnnnnnnnnnnnnnnnnnnnnnnnnnnnnnnnnnnnnnnnnnnnnnnnnnnnnnnnnnnnnnnnnnnnnnnnnnnnnnnnnnnnnnnnnnnnnnnnnnnnnnnnnnnnnnnnnnnnnnnnnnnnnnnnnnnnnnnnnnnnnnnnnnnnnnnnnnnnnnnnnnnnnnnnnnnnnnnnnnnnnnnnnnnnnnnnnnnnnnnnnnnnnnnnnnnnnnnnnnnnnnnnnnnnnnnnnnnnnnnnnnnnnnnnnnnnnnnnnnnnnnnnnnnnnnnnnnnnnnnnnnnnnnnnnnnnnnnnnnnnnnnnnnnnnnnnnnnnnnnnnnnnnnnnnnnnnnnnnnnnnnnnnnnnnnnnnnnnnnnnnnnnnnnnnnnnnnnnnnnnnnnnnnnnnnnnnnnnnnnnnnnnnnnnnnnnnnnnnnnnnnnnnnnnnnnnnnnnnnnnnnnnnnnnnnnnnnnnnnnnnnnnnnnnnnnnnnnnnnnnnnnnnnnnnnnnnnnnnnnnnnnnnnnnnnnnnnnnnnnnnnnnnnnnnnnnnnnnnnnnnnnnnnnnnnnnnnnnnnnnnnnnnnnnnnnnnnnnnnnnnnnnnnnnnnnnnnnnnnnnnnnnnnnnnnnnnnnnnnnnnnnnnnnnnnnnnnnnnnnnnnnnnnnnnnnnnnnnnnnnnnnnnnnnnnnnnnnnnnnnnnnnnnnnnnnnnnnnnnnnnnnnnnnnnnnnnnnnnnnnnnnnnnnnnnnnnnnnnnnnnnnnnnnnnnnnnnnnnnnnnnnnnnnnnnnnnnnnnnnnnnnnnnnnnnnnnnnnnnnnnnnnnnnnnnnnnnnnnnnnnnnnnnnnnnnnnnnnnnnnnnnnnnnnnnnnnnnnnnnnnnnnnnnnnnnnnnnnnnnnnnnnnnnnnnnnnnnnnnnnnnnnnnnnnnnnnnnnnnnnnnnnnnnnnnnnnnnnnnnnnnnnnnnnnnnnnnnnnnnnnnnnnnnnnnnnnnnnnnnnnnnnnnnnnnnnnnnnnnnnnnnnnnnnnnnnnnnnnnnnnnnnnnnnnnnnnnnnnnnnnnnnnnnnnnnnnnnnnnnnnnnnnnnnnnnnnnnnnnnnnnnnnnnnnnnnnnnnnnnnnnnnnnnnnnnnnnnnnnnnnnnnnnnnnnnnnnnnnnnnnnnnnnnnnnnnnnnnnnnnnnnnnnnnnnnnnnnnnnnnnnnnnnnnnnnnnnnnnnnnnnnnnnnnnnnnnnnnnnnnnnnnnnnnnnnnnnnnnnnnnnnnnnnnnnnnnnnnnnnnnnnnnnnnnnnnnnnnnnnnnnnnnnnnnnnnnnnnnnnnnnnnnnnnnnnnnnnnnnnnnnnnnnnnnnnnnnnnnnnnnnnnnnnnnnnnnnnnnnnnnnnnnnnnnnnnnnnnnnnnnnnnnnnnnnnnnnnnnnnnnnnnnnnnnnnnnnnnnnnnnnnnnnnnnnnnnnnnnnnnnnnnnnnnnnnnnnnnnnntctgcctctctggacctggctctaagggacaatttatttggtggtggattgaaggcttgtgctacattctgggctggcaggtgaataaggcttgggttccctgttggtgagccttagcccctggccacatagtctgtcctcaggctgctggtgctcctctccccataaatggtggtggtggggggcatttgatttaacttaattaaattcaagtcaaccccacaatcattttttgcatgttgccttttgcttgtgtgtcagatctagggctcacctctggaaatagatgagtcagaggtactctcagccctagagaagtctaccacttatggatggccatcgttctcccacaagcagcctctgaccctttggcctctctctaagacaagttgaagttggccacctgatccttccagctgtttgggaagggcagcttctcaccctgggctcctccctgagtgctcatctggggagttgcgggagagagcagccttgttgctgtttgagtatgtgcctgacagattctaggggtagaggcattgcagatgtgccttggccttaacactccaggctcaatgttttccagatacttatttttcatgttattttattgtttgtgtgaaataaaattttgtaagcacttactgactacagccaagaaagtgacaactgcacttggttgatatttctgctgtttactcttgagctattagaagacatacagtcacgcatcacttaacgatgaggatacatcctgagaaatgcattgttaggcgatgtcatcattgtacgaaccccatagagtgtacttacacaaacctagacagtacagcctacaacacacctaggctttatggtacagcctatcgctcctatgctacaaacctgcatagcatgggactgtgccgaatgcaatagtaacacggtggtatttgtatatctagtggtatatgtatatctaaacacacctaaacagaaaaggtacagtaaaaattcagcaatataatcttctgggaccactgtcttagatgcagtccatggttaactgaaatgttgttaagcagtgcctgatcgtacacatgttttggcctcccaggtaatagaccagcaggctccttctgccaggagcagctgggatggggctggccctgtgtgctggggtcgctggctctgtcggtccttttaggcaagtagatcacctcacgggttagcagaatggctaagcaaatgggtcaggacccaggcttgagttggaattctgtctaatcacctcttactaactgtagaaccttaggtgaatgcctcacttttttcacctgaaaaatgggggtaatgagattacctaccttgtaggtggcagattaaagaagttaggacatgtagagcacttaaaggtgtgcctagcacatttacctaggggtgttagctgctatcgtgtttaacataggcaggagagacttgggacttagggaactgaacagtggattccaagttttcattcatctgttcattcattcattcattcattcattcatctattgtttcattcatttgtaatccaaatataagtagttgtgcctcatgcagcagtggtgcctcaatgtctatgtagagtcacattagaaaaagaaagtagtggcatgcaaagcaatcctttactggtgttctttgaagaatgtcaaagaggatccttttcataactcacagccatgcttcttagaatactcctgtttctgtctcttccccttgtctctcacaagccgccgtctccccaaactctccaggtatgttacctttcatagcccccgggagctcttgcttctcctgcctgctcctctttctgttcctctttccctccaacaaaagtccaggaagcctgaggaaatggggaagatacatgggccaatactggatcccaggagcaggcagggagagaggtggattcttacctgctgtcactacatccctgctgagtgcctcctgtgagagtacctgtactgggtgatggaaatgcaggtttatgatggagccatgccctggaggagactgtggcatcacagctctgtgcctgctaatgctgggaggtgggagcctgccaatgctctggttctaccagtttccctccgaataggtctgtgtcagatgacagagtgcggaactcagtggggttccagttagggcttgatctaggaggtttaaggggcttccttttctcagaagacaggggagagggaaagacaggaggagttgagaatgtttccaactggcaggtctgcagtctgaggggagctgcctgaccttcgggggtcaagctgtcaagaatgcaggctgtggcatcagtcagatgtgagcgcaactcccagcatctcccagacccgctgtaggacttggacaaataatgtgaccttcctgagccctgagtttcttatctgtgggatggaagtcatgttctccttcacagggctgtgggagcactggcagaggaacagttagagggcagtttgtggtgttccctgactgccacctctccactgccttccctgtccactccccaggcttgtgtccctggaggaaagcatagaccacaaggttagtccctccaggaaggtgcctgcctccacatggtggccccatggatttagcctggcctggagcctccagcttaccccttaacaggagccaggaacgtatactgcactccatgtctggtggacacctgtgctccatctgacacccccgccccaccctgtgcagagagcccctgctggggaatgaggccccaccctccttcagggggttatgatctcaccgagatggaggaaaccaatgtgaatgctgtggactcaggtgcttagaaggatgctcatctctccactacacaggctccagcagtggcctctgcttacaaacctctgcacatggggaactcaccatcgattaaggaaacctattttgttgttgggtagcttgaagtgagaaaattaccttatgttaggcaaaagctgtcctgtggcttctacccattagttctggatgggtgttcttgggctacacggcaattttactttcttttcccgtcagcccctcggttatctgaagatagatgcatgaactttgtggtcttcttgatgagcccagccccaccagctcacccactggcctgagttcatcagtagttactgagcacctcctgtgtgtcagatgccctgaaactctgcagggtgtgggggtctggcagggggtaaaccaggcgaggccaccacacctatggaacttgcattttatgtgagagagggagaggcaaaaaagcaaaataatatcatgtggtgaagagttctgtaaggaattagaacagaaccatgtaatgagacatgactggggctactttcggctatgtgaccactctgacttttcagctaacatctgattgctggagtcaggcctgagaaggcctttgcttttgtaagggagacctttaccattgcaaaagtcccaagatggaattaaagctggcctgttagaggaacagagagagaatgcctgtgnnnnnnnnnnnnnnnnnnnnnnnnnnnnnnnnnnnnnnnnnnnnnnnnnnnnnnnnnnnnnnnnnnnnnnnnnnaaacatgaaagcagaacaaatatcattgcatgcatcagatgagtaagacccttaaagcctcactttaacaagtattggacaaatcggaggctaaaggtctagtctctggcaaaggctgggtcattgagggcttctgagtcttggtactttaaatacccaacttctaggggtgtcttctactcataaactttgtgtgcatcttttcccccctaattttgggtaatcctggccaatgcaaaacatgcatccctcagccaaagcccccaggctgtgagcatggccaggctcacagggagaagaatgctgcatgacaccatctcatcagcagtccctggagttgccttggttctcatgatgtatcgttagaaaacatatcagtggaaattgctctttcatcttcatcagcatcacttttgtgttgtggagaaggcccgtcctcattaggagccgaggaggaggtgagatttgcagcaggagccccctggcagacaccacaatcacaacccccacccccacccctgctcggccgcagttgtcattaatctgtatttcactcttgctttcatccttcacttgctgtttgtcatttttggagaaggatcctctctgttagcacatttggaacctatttcattgctgaggagaagggaacaatacaggttttcatctcagactaattatgcctccagtacactgatgctaaataaaaccaaggggaaggtaattggagattcttgacgtgacattcacagctttgagaaaaacagatgttcacttgaggagctgggaagagaatacatatccctgtgactggccaatgagattagttccaggaggttttgagacagagctgggccacgcctcatcctgcagatgtggcgtgaggaatctctgctaagcctgcctgctcctggctggcctggcttgacctggggtcctaggtcccagcactgtgtcccctgtccctagtcatagggacgaggtgctgtgtcctcacctgggatgacttggacaactcctgtgttgagtcatctaagacactttgtggcaactcaggtcttacacctgaaagtgcctacctgcagccttgcctcagccactcaccagtgtgggactctgggcctggactgtagcctcatggtggcccatgtctttattgtcgggtggagactacacctcattagattcctggaggacttggaaaagacaatgtctgtagtattcccagaccatggaatgtcatccagagattttatttctttgcaaacaatggcactttccagcaggttaaggctgcacctaatcctcagtgcctcttcctatcaggttgagttctttgacttccttcaatggcatgactgattggaccagccaaacactgatatctgttagcctgggaagctgtgaacaccagatcctcatcctctttcatgtgaacactttcaccaggtgcaaataataatgaaggcagttgaatgtagcttgggttaacccctttatccctccaagtcccttatattccacctgttaagtgagtgacagctcttgcccagtttaatttatagaacacatatatcagggaacaggtgtccttccctgagatacatacaggtatctttcaggctagaaaatactctggatcccaaataacttcagtgattggggcaaaatcatgttgtgttgcaactattcctgatgcattgctttctctatccaggccagggggaggtctttaaggtcagtggctgggcatggttgattggatggttgccccaagttcctcacacagccctgcatccacatgcttgctatgttctcatggtgggtggattttagtagggaattaaaaaccctgtgacttgctgtggccaagggcatgtaggcagagatgacaaacttccagttctgagcctgggtaaaaaaaagagatattggatgtttccacctgtcctcttgagtttctatcaccttcatgttcttgaaaatctactggtccaaggcagatgagaaacataaggggcctacaggagccactgagctgagctacaaacttgcagtgaggagcagatctgcccaagcaacccacaaatctgtgtgaatagatgatgcttgttttagctactgagttttgagttgtttgttatgcagcattattttggcaattactaactgatacgctgggctttatttgtgtctgcattctccacatccagcaaatctgtgcctggcatagaggaggctcttagaattgtttactgaataagcacatgaatcaatgagtgaagaattttatttggttgttaaatcttattgtgttaattctttctttacattgacacacatggacactctgaacctgagggtcttctggggtgcccacctcatctgattaactctttccaagttttgttaggatgaaagctgtgggctagcctctttcccaacgttacagctgggaaagaggggaagaagagtggtgcctgagagcagacatggaatgctaagcctggtcctgggatggccatctcagtgatggcctaaggagggcagtagtgagccccaggcttctgggtggtagaggctggaagtccccctgatgcccagctttccccccattgcctcttcgcaatggtgccctccttctcaataggtggctgctgtagggaggtgttcaaagaggcctgtggcaggtgttctgccccaagccatcttcccctcttcctgggccagccagcacagacagacccagcagccctttccatttctctctaaaaagcagagccacatggtagagcagggagagaagtggacctgggatgggtgacccagggggtgaataaagaatggaaggccgggggcggtggctcatgcctgtaatcccaacactttgggaggccgaggcaggtggatcacctgaggtcaggatttcgagatcagcctgaccaatatggtgaaaccctgtctctactaaaaatataaaaaattagccaggcgtggtggcacgtgcctgtaatcccagctactcaggaagctgagacaggagaattgcttgaacccgagaggcagaggttgcagtgagccaagatcactccactgcactccggcctgggtgacagagtgagactccccctcaaaaaaaaaaaaaaaaagaatggcagagtttaagatttattgaatgcttactttgtgctaggcccttgacatgcatttttttctttacctatgaggagtgctgtaactgaggacactgaagcctagtgaggctggaccacagaagcaggatttggaccccagccatcttcctctagagttccagctcttgaaagcccatggtctcatcctggcctgcaggttagaatcacctggagagctttcagttaggatcaaggcccagatcccatctagaccaactaagtgagatccctagggaggaggccagtcaatgagatgcttaaacatctccccagatgatctgatgacatagagaggccttctgcgacctgactatcatgctatgtccaatggcaggcctggcttatagctggggtgtgcctgcagtggcaacctggcacaaagcaatgtgtgtggttgtcctgtggagttgagacatgagagggagccagcatgggcttggagagagccctgtttggccactgagatgttgaggcaggccattgttcctcagcctgatgacagcaattcctagagcccattaacaaggccccttgtgttgggggctcaagacctgtgctgagttttgtaagccttgttcaccctgggcggtggcgggagcatatcatcttctgaacactcagtgtttcattttctttgcacgtcagatttgctctttccttctgttgttcaccatgtcttattagctgctaggctgaggccctcgctggagttaagggaatggttgttttgacttacagaggagggaaactaccttgaagcaagataaacaggagagcagatacatattgtgaaatatactcaatctataaccacagctggaagaacgtttgcttaaaaaagggtcaggagaacagaagaaaaggtcgatgaagggaaggtggaacgaatgtttgggtttctttaatgtgggaggtgtgcaggctgggctgcagtgagaactcagtgaaggcagcacacgctagggatggcatgggttggggaggggctcggagagggaagccggacagggtgggcacttatgatagccaacctcggtggggtctgccctaagacaactcaggaaaactgagtgatcgaaacacaactgccagactcacaggcattggtgtgcccttaggtgcctgggcctttttcaaaacatgctggtgaaattctgaaagtgatcaaagacctctcttgttaaacataggacctgcaaatcaaaggaagtgggaaatcagaaagactagaagggaggcagataaggaaatgcaaacaatcccaaggagaaaagcagagcagagtctggtgctggggatggcatgtgagggctggcactgctccatcccagggattctgctcttttggggagatggagctccttctggaatattgtgtatacatgtctgtgtgcacatgtgtgggtgtgcatgtgtatgtgcatgcatgtgtgaacaccttctgtcatggaagtttccagtcccagaggagaaaaataggacaaagctccattccaagcaggcagaataataacagctaataaccttttgaggcttaccacttttctgagcactttttttgtttatcttgtcgaatcccctaaattccacaaggtagggttttgttaaaatctctgttttactgggggaagctggatgcaaagaggttatattgaagtgggaaaagttctcttgtccccctcgcagggtgtgcgatgggggtgtggctcgcttcttcagtgccccgctgctcaaacctctaggggagcatacagacgggcaggctgtggggctccgaccccatggcgatgtctaggagtgaatgtttacagctcctgaagccccagtggacatgtgttacagggtgctctcttagtttgctgtctgtaggcggcttgtgttaaccagctcaattagaccctctaccttgtcgcacggacaaagggctctctgtatcccgggttcttgccttcatgtactggaagaattggatcacacgtgggcttggagaatgagtgcaaggttttattgagtgggagtggctctcagcagatgggggagcaagaagggagatggttttcccctggagttgggttgtttggcagcctgggttctcctctgagtgccctggccaaattctgcgttgttctgctggtcagtggctggctggcctcccggtacctgctgaagtgctcctctcgatgtccagccacctgtgtgttcccccgatgatgagctcctctcaatattcagctgcctgtgtgtttgcctgttagggtctcagcatttttatgggcacaggataggggcatggcaggccaggggaggtcttgggaaatgcaacatttgggcaggaaaacaaaaatgcctgtcttcacttaggtccatgggcacaggccagggagtggagccctagccagggaccacacccttcccttcccccattctgtatcatttaaagggcccatgcccttcccttcccacctcctgtatcaatataactaggccaaggtttgggccaccctgtggggtttgccactgacatttgtgaggcttgtacatcgtacctgccaagggacgcccttcagatcacggtcctcatggctgtgcattgttatcagggcacacctccagcagtcaaaggtctccagcagaatagctgtttgggccagggcagggccacagggctccaggttccctcccagagcagctatcgggcagtgagaagaaggcacctggataggatgcaggtgtgccgtggtgccacctaaggcaaagcgctaatactcagtgagctgtcaccaggcctannnnnnnnnnnnnnnnnnnnnnnnnnnnnnnnnnnnnnnnnnnnnnnnnnnnnnnnnnnnnnnnnnnnnnnnnnnnnnnnnnnnnnnnnnnnnnnnnnnnnnnnnnnnnnnnnnnnnnnnnnnnnnnnnnnnnnnnnnnnnnnnnnnnnnnnnnnnnnnnnnnnnnnnnnnnnnnnnnnnnnnnnnnnnnnnnnnnnnnnnnnnnnngctttcctgctgtgcctgcactgggaaagcttccttttcctagacttgtcatgcaggatttgtgtcacttggtgttctccgtaggcaggtctggccctcactctccacaggagtctggattctgtcaccacaaagacccatctaggcttctgatctagaagtcctctctcgtagaacttcacctctctcctcacctcctccttgttgtcaattcattttcctcttcacccctgggctccttcacctccccagctccattctctatcccatcttagccgccacctccaacggcctcatcctggagcctgcccattcccggaactctccattgccagcggccatgcagtcctgcccttcgttcccttgcttccgtagacatgcccgtgcacctcaccaagacccctcttctcactgcacattcctgatcatctctgatgatcaggaatcagagaagtgaatgacttggcccaagtgtgcagcccaggaagaaatgtttgacttgaactcaaggctccctcctcccatccccgcacctgaagcaggctcctccctctatccccacacctgaagcaggcccattctcccatccccacacctgaagcaggcccattctcccatccccacacctgaagcaggcccctccctccatccccacacctgaagccagaacctccctgtattcccacacctgaagctggcccctccctccatcccataatctagatgagattttgtgttttgcttttttgacctaacatcctgggataaacatttcctgtgtggttgcaaagcctttctaatcgtcatttttagtgattgcattgagatgaagaattgttattgcataccctacctaatgtttcctgttgttggacattgtgactgtttccaatcttcaatttttttttgacggtgttcagtgtaaacctgcatgtgcagtgtttgatttttctcatttggattattgctgacaggaaatttcctagagcaggagcaaagggtcagggaaggacagacacttggggagctctcagaccctggagctcatggtccccaagaccgtggtcttgactgccatgctgagcagtggatatcatcatcctcctttgcaattgggaacactggcctttccaacatcttctctcacaaggcttcctctccctgaagcagcccccatcctcttgtcccccttgcataccatgctaactctaccatcattttcctctccccatcgcggctcctcagggcagcattcctgggtgacctgtggtgcccaggccagttagacacatgcacagtgcccgtgcttttccctcagggtgcagacttcactctgcaatgatctgtctgtcacaggcttatttgactgatgtcaatctctcccctagattccaacctttgctggagaggggggatggcatctttctctccacagtgccggctctggtgcttggcacacagaagaggcttcagtgcttgctgaatggggaatgaaggctctgtgtgccccggacactgctggggaggggcagctggcccctagggctctgctttcattgaagagcgtgttccccacccaatctagatgtgtgcctcagaaggctaggactcaagtgtgggaattgtgtgagagccacaggaggcaagaacagccagtgctgtgtgttctgaagagatagcgtggtgcagaatcaaacagggcatctgtaacagacagaccatgcttctgaccggctctgtgctccacaactgtgagaccttggccagagcgctacaccctctgggcctcagtttcctggtctctgtggtgggcacactccaggccttaatggacaggcataaccttgcccaccctcactgtcttcctgggcagactgaagctatcccagtgcctatttcatgcagctctttcctcaggtatttggggtaacagttcttgagaaaacatggctcgttaaattgaaaagtgcttctccaacttcctgggaaagaggatggcactaaccctgtccagatcttcagagccaccgtaaatcacttccttaaaaatcccaaacttgtgtgtaattatgtgactatgtaatgaagtcagaagtgggtaggattgatttgtcaggtgaattaatctccacagcaagtggaggcacatgggggcacgaggcctgtcacagccttgtcacctgctgcaggcttcactggcttcctgctctcaatgctgtaccttttgcccccctgtccgctgtcgcacaccctaggcacttcatcggccatgcatgaaggtccagtgcactgtctcaggccgggtcctgggaataagataccaggctgaattcagctggacctgaccatggtgcatgctagggtgtgggtttgtgtccaacattgaagggacagaggcagagccctgtggtcctgagggcctggagggtggggcagctgggccaggccctatggaacaaggcaggaatgactctgggcattcagtctgccgaggattgcccctgatgtatggcatggaaatgttctctggccgcagaggagctggtgctccctttgtgtcatgctgcctgtctgctgccagctagggctgggggccttgtgaagcactgagcatggtgggcatgcacctgtctgggccatccttgcagcagggacctttaccctgggagggaatcctatgccctggctaagcaagtgggtgtgagttgtgcccctcgtgggttggaggaaacaggtgtgggatgcctgtgccgggccttctcgtgggtgtctggccacccctgcacctgctgaggcctggcttccagagttggagggaacttcacagagcaggcgtggttgggtctggggtcccaactgcaccctgagctctgagctgggctggccagcagctttgcaagaggaactagccccttctacctgccaggtttggatttgaaccctggtccgtatgtctccaagcctgttcttgttaaagaacagggtgggcagagagtggagtggtgcctaccccgtgggataaggcacctacctctctgccagactggaacaagtatgcacatgtgcacccttacacatgtgtgtagctgaagagagtctgaaggccacatcagagagccatgcttatgagggaagtgcggcagggggagctgtcctcctgaggccaggaggaacagttgtgatgaatgagattgggaggcaacaccatgagggctgtgcccagcatctgtcactggatgactgattgattgccccatgtgcagggttcagcccaacagtggttagtaatgattctctctctctctcgtgacatggttgggccaggggaggtgggcagtgtcccagggtggccttaccctctgtccttgctacccttgaggtacaaggcacacacctttcctaagggccccccactgtggcaaacgtttaagagccatggctggagcagaacgtgagatgctgtggaatgaaggggagcctgttcctgtcccctaagaaggcattacataagcagcatcgggagtcctcttcctccggggcctgtctgcagtttcactgcttgtccacatgggctccagctcccatggctgacgcttgcttgggggagcctaggcctgtggcctgggggtgcagttgagcctccttacatggcataatgtgaatctagccctgggcactaagctgaggctgagagggtggcagggaactgcgggcctcatcacaggctcacagggaatgactgagggcctcagaattccccacctgggccctatagggaattgatggccagctctggtctctggccccaggaggtcagcctcaggtggcagagtggcagccgactctggtgctgtcctctatcctggctccacctctgttgcacacaggggcttagtgggctgaccagtgaggggtgtggtcatagctgccagccccttctgcttgcccatgctgactttgtcctcttgctttcctgctgtattagcccatttcatactgctatgaagaaatacctgagactgggtaatttataaagaaaaagaggttaaatggattcacagttccacatggctagggaggcctcacaatcatggcagaaggtgaaggagcagcaaaggcatgtcttacatggcagcaggcaacagaacgtctgcaggggaattgttcttttataaaactgtcagttctcatgagacttattcactatcacaagaacaacttgggaaaaacctgccctcatgattcaattacctcccactgggtgcctcccatgacatgtggggaatatgggcactacaattcaagatgagatgtgggtggagacacagccaaaccatatcacctgcccttccataggcctcgcagtctggttttgaacagaaaaagaggtttaatagattcacggttccacatggctggggaggcctggctcccgtcccctgggcctcttggcactgctcccaggtagggcctttccaggactgggcacatttatgttgtggggatcaggcctgcattcctccttagaggaagaatgattattctctgtttaacataaagcaaatggtgtggcagcgccgggcagggctctggaacaccagccccagttttccctgtcaatgagtgggcatggggtaatgccttgtccacactaagccatctctgtgaaatgggcctgtgaccctttcttcagctgcccaggcccaacatcttgatgctgtctttgctgcttcttcctcatgcccctcataattagtccattagcagttctgacaccatgtgtctggattctgattacttctcaccaccccaatggctatgtccctggtctaagccattgctggcatcagcctcctgacctgccttcctgcttctcaccttgctccatgcagcttgtcattctgaggcagccagagtggcctgttaaaattctagctgatcatgtcattaccctgctcagagtcttcctgtctcactggggttatagctggagtccctgtgtggacaaagcagggcgaacacacttcctggtctatgagggatggtccccacttatgccttttgttccagaagaaatattcgttctcagaatcatcctggtttgctctttgtgaatgcttatagcggctttgttgtaataaccgcaaactggaaaccatcccaatgtccttcagctggtgaatggataacaaactgtggtacagccatacaatggaatattattcagcattaaaaagggagtttgagaccagcctgagccccataatgagactctgtctctacaaaaaaataaataaataaaataaaattagccaagccaggcatagtgcatgccatgtagtcccagccactcagaaggcttaggtgggaggatctcttgagccaaggagattgaggctgcagtgagctatgattgcaccacactgcactctagcctgggtaacagagcagagtgagactctgtctcaaaaaaaaaaaaaaaaaggaataatgaaaaacaaaccaggaacaaactcctgttacatacagcaacatgagataattctcaaaagcatatgctgagtgacagaagctgcactcaagaggcctcatactccataatttcaattatgtgatgttcctgattggcaaaactataggggcagaaaactcattggtgttttccaggcctagggataggaggattcactacaaagagccataaggaattgctgtgggcaatggagctgttccgtatcttgattatggtgttggttacattactgtctaagtttataaaactcataagattatacattcaaaataatgcattttgctatgtaaattacactttgatttaaaaaacaagtcctagttagggtgataaattatacggtcattcaacctctaacatcttacctgattcatcctctctttgatgtcacctcctgctgctcctctcctggatctgttattccagccacccaggctaccttgctgtcccatgaatatgccaggtggacccctgcatatggatctctatacttgttttcctctctgcttggaaaaatcgacttccagatagtcacgagccccttctctctcacttccttaaagtctttacccaaaagtccccctatcagtcaccagtgaccatttaatggtgcataacaaacagcctcaagtctcactggaatccagcatctcatgcaccctacaggttggtggaggtgcctcatccaggctgggcttggtgggctctgcttccagctgtgggtctgtttgccagcatctcggcaaggccaagattggaagagcagcagctacccaagagacactctcttttggccatggcacaagcacaagaagacacgtcctgcgtgtgcacatttcaagcttttgcttgtgctatgccagttaacatcccattggctacagcaagtcaagctgtgcagtatacgccacctacagggaggggagtgaatattaccaataatccaaacagtccccatcaccttcccaatgagggcttctctgaccaacctgtgaaaactttagcccccagcttgccattttctctccctcctctctgctttattgctttcctaacactcctgactgtataacttattatacatttcattgattaatcttgtttagtttctgtcttccactcactggagtgtaagtttcaccagagcacaaggacatttatttgttttttttttaatcctatatctccagcacctaagaaaaatgctcagtagatatttgactaaatgattgaatagggttatgctaagaatttattgagatgatatatgagacatgtttcaaatacagtcctgcacacaagaagtgctcggtaattggaggctcttatattctacagcctgcatgctgttgggagagtcaaggctcagttatgtgtgtgattacaatactttgcacaataagcctttgaagccagatctgctttaagtttggcttcagagataaggcgctgaggcatggagaggctgttatttgcccagagtcacttggtgagtcagggtctctttgccctgaagctcatgcacttctccccatgctatgctgcccccacaccttcctgcatgctagttaccaggctctggcctccttccctgcaccagcatccctgaggagtcaaaataactgatgatattagagccccagccccatgagggtgctgaagttggccccagatacccctcccagttatctggaagccagttgcaatgcagggcctctggaacactgagggctgtcctgtgccacccccagccaccagtggcccctgtgcatggagaccccagagaagctgctgtctgcagactctgaagcagtcggaccctgaggatggacagatggctgggcctctggtctaaggagatcacagacacacatgctcaggaaaagcataggccccttctgccaggggagagtcacagagggagggcttgatggatgggatgtggggaaatttatgagagtcatttcatttggtctgtgaccctttatggatgacattgggttggaggagccagactgtgctccaatgtgaaacttcagaaagatgaatttgaccttgagtggcagattctgccctggtgaagggacaaggggcctgggtcgtggcttctcggtgccttgtacacacatctgtgagggccctgccatgatgattttcttgtagtggtgtgttcgtctgttttctctgccagactctgaactactggtctctgtatttccagtgctcatcaggatgcttggccccaacagcatctgcatgtgtttgtgaaatgaaggatttatagagcagtcaccatgggcagggtgctcagcacccctcatctatgattcatttgactcttacctgccccaggaggaaattgctgttatccctggggatggcagagctgggttatagatgtggactcagaaccactgtgctaccttgtcccctgaaattgaaagaagttctggtaccaacactggtggttagtggttatgtgaccctggaaaagccagtgtaatcactttggacctttgctttctgctctgtaaaatggggattacgaatcccattagtcttacaaagaagagggttgtgaaaatcaaaccagagtgtgcttgtgttgagtgctctttaggtctgaaattttattactaatattatttcaagtgggcatcaatggcagtcaataaataggggagttgtagcagaagtgtgacaaaagagagggcttagagaagcttaagtatgacactgatcatttccagtaggtaaacgtgcaaagaacatgatcaaacaaatcacaagaggaaatgcagcttgttagcaaacatatggaaaaccactaaaacttcagttgtaatcaaaacaatgcaaattaaaacaggatgccgtttttcaccactcagttaaagaacatgcagtgctggggagactttggtaaaatgaacacttgcccgtaacctggtggagatgttctggaaggtaaattagtaatgagtatctggaactataaaaatgtttgtaccttttgacccagtaattcaatttctaggagtctctccagagggattattctaaggaagctttctgcatgaagttgttcaaaacagctgaataaaaaatgggtgataatctaaggagccaatgttaggggtgtggttaaggcaatgacagtatccaagttatagaggatcctgcagggaccgatgagtgcttgccaaatcgcatcagatgactgtgtaggctctaagggaaaagcaagacacaagaatgcacatattttattacaactatgtaagattctgtagggatctttgcataaagccaaatatggaaagaggtaaaacagaaaatgttaacaatggttgtgtgatggtgggatgaatatgagtgatttaagatcatccttttaatagtaagcatgtactcctttcatatcagaaccataatatggtaactacattgacttgaggatataaaaggaggccagatgccactggaacagaggtgccatggttagcaaaactgagtcaaagaactacttatcttgtgtggtatttttatctaaaatccactttgtggaaaacaaagggatgatttctgaagataagccatgctggaaaataaccactcgattgtattttcttcatgtctggaatttttttttgtttcacatttggttatttattactgtctctttttctcaagaagtgattggaatgcttttcttctgttgaaaaacaagagaaagttatattaacttcagccatgatagattcacatgcagttgaaagtggacttggctttgtctcaccctcttcagagataaccactgtcaagagttcaatatgtatctgtccaccttttcccacatacatggtgtcatatagttattatttattctttttttaaaacaaagattgtgttatagtatgcatttttttttcatttagctatatatcctgggcatttttctatttgagtttgtattaaagttctccagataaagagaaccaataggatacagatagatagattatagatagatagatgatagatagacagacagatagctagatagataggtagacagatagatggatagacagatggatagataggtggtagatagatagacggtagacagatgatagatagatgagaggggataaaagtgttccttttaccagtctccccagcactgcatgttctttaactgagtggtgaaaaatggcatcctcttttaatttgcattgctttgattacaactgaagttttagcagttttcgatatatttgttaatcccctaataaatcctctctcatctatctatcatctattatatatctatcgtctgggattggctcacatgattatggaggctgagaagtcccatgacaggctgtctttgagccagagacattgggatgctggtagtgtggctcagtccaagtctgaaggtcttaggaccagtgaagtggatggtgtcactcacactttaaggccaaaggcctgaagaccagggggccactggggtaagtactggagtccaaaggctgggaagcctggagttgttgcccaaggacagtccctttgaaactaagacctctaggccagcagagcataaagttgcagtaacaggaagcaaaaattttgctagtgggtcacttggggtaatggtaagtggtgccactcccatttccatcccttgattcctggacccgtgaatcctggctacggaagaaacagtaccacatactgggtgctgatttagagcatatacagccttctggagaatgttgtcccagctctgcaaggtactgtcacctagctggtggtgtaactaagtatttagaaggctatcccatcattctgtcaagctggctgcttcaagatgatgggtaacatggtaagaccagtgaattccattagcatgagcccactgccacacttctttggctgtgaaatgagtttcctggtcagtagcaatgctgtgtggaatactgtgacagaggataagtccacggatggtagcttttgcagaagcattgtgtgcaggcatagcaaatccgtatctggactaagtggctattccagtaagggcaaaatgctgccacttctctgatggaagtggtccagtataattaactggttgagcaagattgtgcctttaatggagataaaactatggaaacatttgtggggctggaacagtctgtggttgtgggcaactccttcagccattatttcttttttttccataagttattggggtacaggtgttatttggttacatgaataagttctttcgtggtgatttgtgagattttggtgcacccatcatccatgtatacactgcaccatatttgtagtcttttatcccttgccccctctcactcttccccccaagtccccaaggtccattgtatcattcttgtggctttgtgtcctcatagcttagctcccacatatcagtgagaacatatgacatttggttttccatttctgaattacatcacttagaataatagtctccagtctcatccaggtcactgcaaatgttgttaattcattcctttttatggctgcatatatatactacagtttctttatccactcattgattgattggcatttgggttggttccatgattttgcaattgtgaattgtgctgctataaacatgtgtgtgcaagtatctttttcgagtaatgacttcttttcttctgtgtagaaatccagtagttcgattgctggatcaaatggtagttctacttttagttctttaaggaatctccacactgttttccatagtggctgtactagtttacattcccaccagcagtgtggaagtgttccctgttcaccacatctgcgccaacatctacttttaaaaaaatttttttttattatgaccattcttgcaggagtaaggtggtattgcattgtggttttgatttgcatttccttgatcattagtgatgttgagcatttttttgatatgtttgttggccatttgtatgtcttcttttgagaattgcttattcatgtctttagcccactttttgatgggattgttcatttttttttcttactgatttgtttgagtttgttgtagattctggatattagtcctttgtcagatgtatagattgtgaagattttctcccactctgtgggttgtctgtttatgctgctgactgttcctttttccatgcaaaagctctttagttcaattagttcccagctttttatctttgtttttattgcatttgcttttttattcttggtcacgaaatccttgcctaagccaatgtctggaagagtttttccaatgttatcttgtagaatttttatagtttcaggtcttaggtttaagtccttaatccatcttgagttgatttttgtataaggtgatagatgaggattcagtttcactctcctcctgtgactagccaattatcccagcaccaattgttgaaaatgaattagggaggttttctttccccactttatttttttgtttgctttgtcaaagatcagttggctgtgagtatttgggtttatttctggtttctctattctgttccattggtctatgtgcctatttttatatcagtaccattctgttttggtggctatggccttacagtatagtttgaaatcaggtaatgtgatgcctccagatttgttccttttgcttagtcttgctttggctatgtggactcttttttggttccacatgaattttagaattttttttttttttctaattctgtgaagaacgatggcggtattctgatggggattgcgttgaatttgtagatagcttttggcagtatggtcattttcacaatattgattctacccatccatgagcatgggatgtttttccatttgtttgtgtcgtctgtgatttctttcggcagtgttttccttgtagaggtctttgactcctttgttaggtatattcctcagtattttatttattttttgcagctattggaaaaggggttgagttcttgatttgattcactgattggttgctgttggtgtatagaagagctattgatttgtgcacattagtcttgtatctggaaactttgctcaattcttttatcagttctaggagctttctggaggagtccttagggttttcaaggtaaatgatcatattgtcagcaaacagtgacagtttgacttcctcttgaccgatttggatgccctttatttctttctcttgtctgattgctctggctaggacttccagtactacgttgaaaaggagtggtgagagtggacatccttgtcttgttccagttctcagagggaatgctttcaacttttccccattcagtattatgttggctgtgggtttgtcatagatggcttttattacattaaggtatgtcccttgtatgctgattttgctgagagtttcaatcataaagcgatgctggatttttgttaaatgctttttctgcacctattgagatgattgtgtgatttttatatttaattctgtttatgttgtccatcacatttattgacttgcatatgttaaaccatccctgcatcccatttatgaaacccacttgatcatggtggattatctttttgatatgttgtaggatttggttagctagtattttgttaagattttagcatctatgttcatcaaggatatcggtctgtagttttcttttttggttacgtcctttcctggttttggtattagagtgatgctggcttcaaagaatgaattagggagggttccttctttgtctttcttgtggaatagtgtcagaaggattgatgccaataattctttgatttctggtagaattctgctgtgaatccgtctggtcctggacttttttttgttggtaatttttaccatttcaatcccactgcttgttgttgatctgttcagggtatctaattcttcctggtttaagctaagatggttgtatttttccaggaatttatccatctcttttaggttttctagtttatgtgcataaaggtgttcatagtagccttgaatgatcttttgtatttcagtggtatcagttgtaatatctactgttttgtttcttagtgaggttatttagattttctctcttcttggttaatcttgctaatggtctattaattttatttatcttttcaaagaaccagctttttgtttcatttgtcttttttttttttcagtttcatttagttctgctctgatcttggttattttctttctgggtttggtttgttcttgtttctctagttccttgaggtgtgaccttagattgtctgtgctctgtcagactttttgatgtaggcattaagggctatgaactttcctcttagcaccgcctttgctgtatcccagaggttttgataggttgtgtcattattgtcattcagtttgaagaattttttaatttccatgttgattttgttttcaaaccaatgctcattcatgagcaggctattgaatttctatggatttgcatggttttgaaggttccttttggagtttatttccagttttattccactgtagactgggagagtgcttgatataatttgaattttcttaaatttattgagactcattttatggcctatcatattgtctatcttggaaaaagttccatgcgctgttgaatgtgtattctgcggttgctggattgaatgttctgtatatatctgctaagtccatttgttccaaggtatagtttaaatccattgtttctttgttgactttcggtcttgatgacctgtctagtgctgtcagtggagtattgaagtccaccactattattgtgttgctgtctatctcatttcttaggtctattagtaattgttttataaatttgggagctccagtgttagctgcatgtatgtttaggattgtgatattttcccattggacaaggccttttgccattatacactgtccctccttgtctcttttagttgctgttgctttaaagcttgttttgtctgatataagaatagctactcctgctcgcttttggtgtccatttgcatgaaatgcctttttccaccctttaagtttatgtgagtctttatgcacataaaggtttggtcatttaacataatcccagacttcttggcagctttgttcatattttcttagtcttctatctttgtctttgttggattgggttaattcaaagaccttgtcttcaagctctgaatttgtttcttctactttttcagttctattgctgagacttcccagagcattttgcatttctagaagtgtgtccaaagtttcctgaattttttttctttaagctaactatttccatgaatacttctcccttcatttcttgtatcattcttttgtatttccttgcattgggcttcacctttctctggtccttccctgattagcttaataactaagctcctgaattctttttcaggtaaatctgggatttcttcttggtttggatccattgctggtgaactagtgtgatttttttgggggtgttgaagagccttgttttgtcatttaccagggttggtcttctggttccttctcatttgggtagtctgtcagagggaaggtctaggacttaaggctgttgttcagattcttttgtcccatggggtgttcccttgatgtagtactctcccccttttcctgtggatgtggcttcctgtgagccgaactacagtgattgctgtctgtcttctgggtctagctacccagcgagtctacccggctcggggctggtattgggggttgtctgcacagagtcctgtgatgtgaactgtctgtgggtttctcagctatggataccagcaactgttctggtggaggtggcagagggtgcagtggactctgtgagattccttagctttggtggtttgatgctctatctttgtgctggttggtctcctgccaggaggtgatgctttctggaaagcatcagctgtagcactgtggagagggaccggtgctaggcggggctctagaactcccaaggttatatgtcttttgtcttctgctaccagggtaggtagggaaggaccatcaggtgggggcggggctaggcgtgtctgagctcagactctccttgggccagtcttgctgtggctgctgtgggggatgggggtgagattctcaggtcactgcagttgtgtacctaggaggattatggctgcctctgatgagttatgcaggttgtcagggaagcgggagaaagctggcagtcacaggcctcacccaactcccacgcaaactgaagggctggtctcactctcacggtgcccgccacaatagccctgagtctgtttccaggcagagtgcgagatgggcttgaaaatttgcccaaggctatctgcctcccacctgggagagaaaagggcttggttcttgcccagcctgtgaagtctgaacaccagatttgtgcccttccccaagttctggccaggagtcttctcaccccgctcaaattgttaaaaagttcagctagagaattccttctccctgtggagttttaccccctgcttctctgtctgccatcctgatggatccctgtggttccaggaaggaatgggctactaggggacccagtgagctcccagggccttctgctgcttcctatacccctgtatttcactcggtcctctaacttgattcagctccaggtaaaggcggaaacttctcccacaaacagaccttcagcttctccagtgggggtgtgttcaggagaggagggtctccctttcccacttctggagttgggatattcacagtatttggggtgtctcttgggtcctgcagaagcagtttgcttccttcagagggtctgtgggtcctctcggaattgctggtttgttcttggagtcaatctggagctaaaattcacaatgcaagcctctgtattgctctgtctagacctgcagtcttgacctgcctcctgtctgtcatgtttccctgtagccattatttcttcaagtactttttcagccccatcttctttctcctttccttccaggactccaatgacacaaatgttagatcttttttttttttcatagtctcacaggttcctgaggctatgttcatttttttaaaatttcagtctattctgtctctgttgtttagactgggtaatgtatattattatatctttttattttttattttttaagacacagtctcactgtgttgcccaggttggagtgcagtggtgtgatctcagctcacggcaacctctgcctcccaggttcaagaagttctcccaagtagctgggactacaggtgtgcaccaccatgcccactattttttttttttttggcatttttagtagagatgggatttctccatgttgcccaggctggtcttgatctcttggcctcaagtgattcccccacctcgacctcccaaagtgctgggtttataggcgtcaccaccaggcacggccatatcttttagtcactgattctttctgctgtctcctctttcaactgagctttatttttggttattgtattttttagttttaaaatttccaggctgggcacggtggctcacacctgtaatcccagcactttgggaggccaaggcaggtggatcacctgaggtcaggagttcaagagcagcctggccaacatggcgaaactccatctctactaaaaatacaaaaattagccaggtgtggtggcgtgtgcctgcagtcccagctacttgggaggctgaggcaggagaatcacttgaacctgggaggtggaggttgcagtgagccgagatcacgccattgcactccagcctgggtgacaagaatgagactccgtctcaaaaaaaaaaaaaatttttttttgtttggtccttctttatatattgtatttccttgctgagattttcttttttcatttggttcaaatacatttgcaattgcccatggaagcatttttatgctagctgtttaaaaatttttgtcagattgttctttatgatttcatcatctcagcgctggaatctattgattgattcagtttgagttcttcctggatctttgtgtgaatagtgatcttcatttgaaacctggaaattctggggaattacgttatgaggctcatgggtcttccttacgccttctgttttagctggtttcttctgatactactctggtgagggggttgctgtctcattattgtcaaatgagggttccaggttccaaatgaagtccaggttctcctcttggtttcctttgaaacctgaggtggaggttctgtgttgctgctgggaagatgtggaagttctggctccctactgaagccaccactgacccttccctggctgggagaagtagggatgcatcgttactgctccccagatggccttcactgacaccatgtaggggggcggtgtgtttgtgaactctttatggcagtggtataaattctgactctatactaaacccttttggatatgacccagctgggcaaatggggacttcatttcagcctggtgaagatggggagtctgggatctgcactcgggctttgctggtgttggggaggtgaaaccgcacttcctttctggagtgtttggctggagtgtggtggcaattatctgaaagttttctgtcttggtagcctacccctttcctggacctttggctagatagagcaggacttctgttgatagcatttttttttttgcctgcatctattgatctttctgggttgctgagttttctgctgcaagtctgcaaaatatgaggcaaaaagaaaactccagacctcaacatcatgtcattcctcaggtcctgaggtcctgagctggtctgccttcttctcttcattgaataatccccagactcttcttatgtttgttttctgtacaatgtttgggctttttagttgtacttagtggggagaataaggaaaaagtatgtctactccatttccctgggagcagaagtccccactctggcctgccctcaaccatgaacccccaaagttttcatctgaagttcctcccagcaatctctaatttgccctggagaagtggagtcactgtttcagagctgggatccccatgctctctgggacgtgacagctgttctttaagcagagagatacaaaattagtcaaagtacagttgctcatttttcaaacatgtttaatgacagaatacatttgcatgctaaacaagtatatctggattctaagaaagtaaggaatctcaagtgggggatatttatttagttctgaattaacagatgtgatctctctctctctctctatccctctccctctctctcttttccttcttatttaccttttatcccattgttgtcttttaattaaacaattccttcacaggatgttccttcattgagaattattaaagatgtaagccttcctttatcaaacagcgggctgtgttaattattgtatagactttacatttggctctggggaaacttgagaattgggtgagagaaggtgcttcattaattggttgagcaagattgtgcctttaatggatacaaagccacggaagcgtttgtggggctggaacagtccgcggttgttggcgaggacagaggcggccagtgttgggagctctgcagacagttcctgcttctgcactgactgtaggacgtgctctgcataagcagatagaggacagagggggtggggaggaactagcactataggggcctgacccagagctggtggctgcaccaccatcctgagcagagccatgaaaacttaggctgcctttgcacggtggggtctcagtggttgcgggctgggagggaggtgggccagcagccatgtggtagagaatgggagcttctcccttgtgctatctgtgctgggctgcacatctctgtgatactgggagattgtgtggacagggacccaagggtgttctgagctttccttctgttaatgaacaaattagttggttgtgattattggacacataggagtggccagtgaaggaaaacagaaagagctggcctggtctctgtcttgtcagttttcactctggaggggaggcagaaaacacacacacacacacacacacacacagacacacacacacacttggatcttcttgtagagacacaggtataaacagtctcaggaacaacctatcacaacaggtctgtacacacacatacacagacaccccggacacacacacacagactccattatgcagacactcacaacacacacacacacacacacacacacaaacacactcaaacccacatgtacattcatgccatatactggcatactaacatattacacacagacacatagatgctcagacacaagagctcccccgacagacacacagacacacacacatccatccatcttctaatatagaggtgagcatagaggcaggatggagaagacccagatgggaagtgtgtataagtgtgtatagccattacaaaggaatcagaagcttgtattggttccatgccccatgccttccatgtaaatacattcattttttaaccctaaactattggtaattttgtctctagagactcaggtgtgttcattcctttgacatacacaggcaagaaagcaaaggaacttaaaacaacgacagtgcatgtatgtacagctcttgagtttgcaattagttcagccaacttttactgatgctcaactgcaggccctgtggaatgtcctgggcatacagctgtgaaaaagatgagctccttctgttccatgagctcctggactttcaaagtgaagtcatgttcaggagcctgggggcactgacacacactcacacaaacaccaacacacactgtccacacacatatatctgtgcacatatgcacacacacagacacttgcacacaagtacacacctgcacatgcccatgcacacacatggacacttgtgcacactcctgcacatatacatgcacacacatgcttgcacacacacacacttgcgcacacaggcacactcaattgtttcatttgcttataaccccctgtgggttctgcagaaccctcagacaggtgtggctttgagtcccagccctgtcgctgactatctgtgtgatggtggcactcagtctccctgggctcgctttcctcatctgtagggtgggaacagtcgttcctatttaaaagcaatctcctgatagatccaataaaacaatgggtgcggaagtgtttggcagatcatattcatctgttcatccattctacaaatatttttgactcctaagtgtctagtgccaaatctgggtgccaggccaaaaataacagacaagagcagaccccagccctcatggaaccacaaagtagaaggaggagagacagtaaatgaataaacagagatggtataagtggagcagacaattgtggagggtggtgagttctgtggcaggaaggagccaagggatgtgatggagaatagctaggtggtcagggagggcttcttgggggtggtgatttgagctgaagcctgaaggaagagcataggtcagccctggggacatggggaacagcactctgatgggaagggacagtgagtgcaaaggactagaggctccaaagagtttggtgagcttgaggaacagaaaggcccagctgggctggggtgtggagacctgagaaaagaatgggctgaagcaagctcgggatgctgggcaatgcccaggccatgggtcccgatggcagtgggagagcctgggttctgctcttggggctcggtgagtatcagaactcttcctaattccccagcctgttcctggtttgatgccacgggctgtgggatcagcagggaccttcggactgatgtcccctgcctgcaagtcctgaagacccctgggatccccagggatatggagaccattggatggaggtgacagctctgagctgccacctgccttcctggtgaccaggaaataaaggagatgttccctgtgactgtccatttcattctgtgagaagactcaactttatttactttgttcctaggggtcaggcaggaggttacctttgagggtattcatcttccccacccaggtccctggagcaccaggactcttggagagtacaattgggagagtacacatgtctcagccggcccaaccagctgtgctctctcgacctttcctgctttcatgcctgttttccacattttctcacacttgcctgcatctgccagttccaccctaacttcttgcccttgggtgcctgcgccgtccttctgaggctggcactggaggtccacggaatggcagtggcagggcagagcccctgtgggcaggcagacactggctgagccccgaaagcccagggaaacaagccgaggacccaaggttccaggctgcctctccagctattcctggaggggtttttcctgctcactccaaaggtaggtgtctctgccctcccatgtctggggctcatcgaagcagtgagagagaggcttatcacgggggtttcttcctgaaatgctcttccctggaaactcctcttctttctttatttgtttaaatatacattgcatgcgtattggtaaaatacataacataagatttaccacgttaaccatttttagggcattaggtacattttcagtgttgtgcaaccatcaccaccatccgtttccagaacttttttattagcccaaactgcaactttgtacccatgaaacaataactccccattcctccctcccctcagtccctggaaaccaccattctactttctgtctctgtgaatttgactgctctacataactcatgtaagtgagatcatacagtattctgttgtgagcggcttactgcacttagcataatgttcttaagagtcattcatgttgtagcatatgtcagaatttccttcctttttaaggctaagtcatattcattgcatggatagacaccattttgtttatccattcattaatccgtcaatggacacttgagttgttttagctattgtgaataatgctgctgtgaaagtaggtgtgcaagtatctctttgagaccctgctttcacttattttgggtatatgttcagtgttgaattgctagatcatagggtatttctatttttaactttttgaggaattgccgtactgttttctacagcagaatttttattgatagaaattttacatttctgtcaatagtgcataagggttccaatttcttcacctcctcaacaatacgtattttctttctttttctcccttcctctcttcctctctccctcccctccttccttcctttctttcttttgatagtagccatcctaatgagtataaggcctcctcatttttaaagacacaggtcagtcatcacctcttccaggaagtcttcggtggtgctcacagcctggctgggcacctagggtgcctccttcagtgccctaggcttccctcgattgcatttgtgtgtgtacctactaccccgtcactgctttgtgagtcccgagggacacaccagatattcagtgcatgtccttcctgccatgccagggcctgatcacaggaggcacacaggacatctttgtggagtggatgcacaacaaccagaccgaggctgatgtccagcagggactccggatgcagtgaaagaagcctcgccccttcccttgggacacctggaaagctttttgtgggtgtgggtgcaaccctagaaagcagcctcctgttgctgcaaagtctcatggctgaaaacacgcaagtacaacttacgagctgaactggagtttggtgtgcactggattggggtattcaggtggaaagctgcctgcagggtgcatgctgagtggaggtcattggctgtgttggccaaggtgacctgattcctgaaggtaatgctggcagatttatcattcttcttcctagggatgaagatagcgacataacttatattccttgtgatttaatgacagacccttcatttctcagaacggaccagagacttggatctgaagataggatggacttttactatcacttggaaaaggaatataagttgtagttgttccccatcgcttcgtgcaatgtctgcttctgaaacaagatttaaggatcagacttcttgacaacagttgtctcatgacagcgaggagcgaaattcactggctgcggttgagaccaactgtgtgtcacattgtgcaaaaccaccatgcacttcactgctgttctacagcagcacaggagatagcatgagcgacaccacgctgggcttagaagatggaaacgatggcatggagctcccaggtggccacacactcagggacaagttctccccgccagtcctcaaccgctacgagagccctggtacccttctcagaaagggcatctcccaataagtgatgctttagatacaactgcatgagaatataatgttcaaggggagaagaaaatgctgctttgaattccaagttcagatgggagccaggccacgtgacatttcagtccacttgcactcacctgttcactcagtcatttcacagactttactgagcccccactatgtgtctggctttgtgctgggtgtagtgacaaagatgagcaatgtgacatctttcatcctccagaaactcttggtctagtggagtgaaaaggcagataattccttgcaggaatagaaacagaaacccagagctgagatcatcagctgcttccacccgctctgtccttgcctgctgggaacacactacaaaggaggaaacatttgagccacatttcagagaatggaagcaaagaaagggggcaggacagtgcaggcagaggggacaatctgtacacaggtgcagagtcatggtttgggcagcactgagtggtggggcagagggaggcgtagggtggggacttgaggttggagagtcagctttggcctggggggctaaaaagtttttgtgggttgtgtgaaggagcctgtgctttatcctgtgggaaacggggcacctccagaacttgggaagaggggcagtggccctgttggatgagttttctttgaggctgtctctggcagtaacatggggatgggttggagtctgagggaccagttagaagttattgcaatggcccaggtgagagatgatgaggacagggtgcaggggaatttccaaggaggcatgcttgcctagagcaaccacaattttgcttaaacccaactccctccctgctctgcacctgccgctgcccctgggcaatggaatgctgttggcagaaaacacatagccaggctgcaactggcctctaggaactccacctgccctcaaatgggtccttcatgctgcaggattattctactgcactgcccagggctatttatatcacgtgttccctcccctcaaacctctgaaactgcttcttctgtagttacgtcttgctattatttttccttttttgagaaaattaagggactttactttttaaagcagtttcgtgtttacagaaaaattgaggaaaaagtacagtgagatccatgtaactgcctcactttcccccaatttcctctattattgatatcttgaattaatgtggtataattgttacaaccaataaagcaatatctgtacattcttattaacaaagttcatagttcacattaggattcactctttggtgctgtaaatgttatgggtttggacaaatgtgtaatgacataagttcaccattattagtagtatgcagaataatatcactgccctgaaaatgctctgtgctctgcctattcataggcaaccactgattcttttactctctctatagttttgccttttctagaatgtcatatggttggaatcatatagtatgtcgccttttcagattggcttctttcacttagcaatatgcatttaagtttcctccgtgccttgtcatggcttgatagctcatttatttttagtgctgaataatattccattgtctggatgtgccacagcttattcattcacttactgaaggacattttagttactttcacattttggcaattgtggacaaagctgctataaacacaatgactttgctttttaatttactgagaaaacgggaatgatgagggcagagctgatctgtgcattcactgccatgtctatcagcttccatcgtctgtggccatgagcctcctcttctgtctgatgttgagcagaaacaccgtgtgctccttctaaaggcaaccccttggatactagaaataattccctgtcacctacataagggtggaattcttgcattgtcagtttctccttttcaaatggatcatatcagtcagctctcaggcacactgtaatacccaccatctctgcacggccctctttgcatccattttcatccccagccccatttctctgctcctctttgagcaaaactcttcaaaatagttaaccttgtcttgaactcctgggccagcctgggcgacagaatgagaccatcacaaaataataataataataatgagatagttacctttacttgctgtttccactgcagctcttcccattctctcaggaacccctctgcagcagatgttggcagtgatcaccgcccatcctcctcctctcccttgtcagtgggctctgcagcatctgcctctctgtgtctggggctttttctggaaccttaaaggccatgttttgcttgcactcagagcaggttggaagtgagggaattagtctacctgggagcattcttcaatcagagatggttggagttggtgtgtagataccctgtcccctgtcccttggtggtaaaatctggcggtccaaattctgcattgtttccctactagaggaagctccagtcgtctgtgtggagatttcttagtgtgctgcttttccttcccacttgcctaatccccccagttttccctgcgtagcacaaatgtacctcttgcacttgactccttgtgtcagagtttgcttctggggactcccactcagacactccactctccaatcaggaggatgccgggcatcctacagatgttgctcctgggggccaaacctagtggtgaaaaaccctgggcttcatcttactccatttcttccttttttccttccttccttctttctttctcctttccccttttcccttttcccttttcccttcccttcccttcccttcccttccctccccttcccttcccttcccttccctccccttcccttcccttccctttcctttcctttttctctctctttttttgtctctctctctcttttattttttccacatagccttgctctgttgcccaggctggagtgcagtggcacgatcttggctcactgcaacctctgcctcccgggttcaagcaattctcccgcctcagcctcctgagtagctgggattacaggtgtgtgccaccacgcccagctaatttttatatttttagtagagacggggtttcaccatgttggccaggctggtctcgaactcctgacctcaggtggtccacctgcctcagcctcccaaagtgctgggattacaggcgtgagccaccgtgccaggcccttactccgtttcttaacagccttcggccatggtggtcacttccttgcacttgtcctttgggacatggttcccttttgggtttcctcctctaccgaatggtcctttcagatttccctgctagctgcttctcaccttcctgccccttgcacccactgctagggaggttaaccagagtattgtctacagaaaggaaataacgtccgcttaaagaagagtgggagttaatttactctataactgttaggtcaaagggggaagtgaccctgtttaagtgtctgacatgctctggtcactttgcacccattaactcgtttgatcttgaaaatagccgcatgatggaggtgctttttatcaccatggacagaggaggacacggaggcccagagaggttgcatgacttggtcaagggcacccagggttggtgctgggatttggagccgggtgtctgtcacattccatttcttttaaggagctgctgactgagacagctgtgttcaaagtggaccctggtttctttcttggcttctatttccctcacttcctggtctgatggatgttttattccctccaacccagtgcccaagccccttgatttggctaagccctggagccctggagccctggagcgaaatgcatgattaaatcatctacagtgaggagccccagggactcgcaggcagcccttgcccccaccagcctagaacattcagcctttatcagggagaaccaggatgacttcagagattccttttcggaactgtgttcaaagggtaatcagcccctatccaggccatttgctaaaacagggctgagtaattcaacaggccgctccaggaggctgctgtgactcagctggtgctgttgagctgctaatgggcttcctggaagtgttgggccccatgtccccacactcacctctctgaaacctgtgctgcttcagttcaaggtactgggtacaacagggagtctgtttatgctgtgtgcgggggatgagcagctgctgggctgttacccagtttctgagtgctgtgctgacgggggtagctccgtcccagccagaggaggtctcccttatgcctgttgagcccccttaagggtggacctgagtctacacagcttctgacatagagctgggtccagggagtctacctgtcaggtttgcacaagagaggaaacccttgctggctcccctcaggggcatccatgctgggtgctgggggaaggcaaacacagtcccagggatttagctgcaaggccagggggctgggggtcctaggttccatggagaaggctggggccagacaccttcctgcctctcccgagccctcatgcctggctcccattgcccagccagccctaggcccccaagcgttctttgaacagtggaagggtccggtgctgaaggcagggctgtgtgttcccattatcaatctcatgtcttattccttgctcagggaagacaagacaggaagcaaggcttttgagaacatgaagtcttttgagaaagaaggtatgagtcccaggtttatgtgacagagagatgagagtgtgagaggaggcagggcagggggatggcttgtggagaagctgctgcaggccgcggagcacccgttccacccactgtctgtgcccagggcagccagctgctgaccgtccccaagaggacatttctaatttacagatttcacactttgcaataaagaagcagctgtgcattttagcaggaaactggaaggaggcaaaaagcccaggcagaaatggatcaattgtgttgtccattaaaatcgttccagggctttgctaagcacatccctggagttgtcgctgtctcctggcctctgggaaagataagctgtatgatcacagccctcttctagctgtggagatgaaaatcaatccgtatgcatttccttggagatggcccatggatgggcaggatcaggcctgccaagggaggcatgagtgccggccctggcactgccagttccctctaagcccaggtcctggagaacccttgagtctcaaagcggccaggctggccatgcatcaggatgttggctcctgaaagccccttgggcagcctcacaggatccttcccagtgagccttggagtcaaagcttcttaggcttgctttgtaggccaggccaagtgaaccattttactgtcactgtcccttcagtcacttaatgtccatgccctgtttcatgcagactgtgtgtggggctgaggttgagttttttttcccatccatgatttgtctgctttcaatctatgtattcctcagcttcccatcctaatatccagctcccaatataggttctcagagggctgcaaagagctctcagtctacaggtggggacagtggtcaaattagagtggggacagactcctttttctttcaacgcacacgaatcactggccatagccacacaatatgtgttcgaatggaggtctgtgcaggatgtctacacacatggagacgtagcagatagcatgattgcgtctgcagggagcagggaatgctttggaagaggagccctagtgcactaggtttaggtgggaccgagctcaaagtgggaagggcactccaggttggaataatggggtgtgcaaaggtgtggttgctgcagattgcagggtgtgttcaggcagtgggtgtgttttggaattcttgaatcagaaggtttgttggaagacttggtggtgaccagatcaggaagggctttggagactgtcctgaggagttgaggcttattctgtaggtgatttggagcaagtgtgggaatgagccactgagtatcactgtgcagctgaatgaatgaccaaatgcacaaaaggaacgagcaagcttcactaagcatgacaccccacagtgagaggcctgggaggagagtccagctcaactcacccaccatggtccccgcggaaggctcctcgtttgtcactgtcccaccctgccagtttgactcagtatgagttgaattgtgtccccttccaaaattcatatgccagagttctaactccagtacctgcgaatttggccttatctggaaatagggtttttacagagataatcaaattaaaatgaggtcattagagtaagccctaatccaacatggctggcatcctcataagaaggagaaattgcgagacagacacagggagaaggccatgggaagaagaagccagagatcagggtgatgctgccacaagccaaggaaggccaaaggttgagcaaaccctcagcagctagtacaaaggcagggacaaatccccctcacagccctcagaaggaaccaatcctgccaacagattgctcgccatgatgtgggtgggcctcacctaatcagttgaaggactgaatggcccaaaatgctgacctccaaccagcacaagagattttggccggaggactgcctttgaacttgaactgcaacatgaggtcatctatgggtctccggtctgacagcccccctcacagactgtggacttgccagcttccgccatcacatgagccaattccttaaaataagcctcttcctctctcaatgcacacacttcttactggttctgtttctctggagaagcctgactaatacatcaggtttggccagactgttgctgagagcagcagctgccgagcttcaggtaccccagaccagctggcctgaactccagtgattcatgaccgacttccacatttttatcatatcttcatatcacctgttaattacttactgtttctttctttaaacttactgtttcattacttaaatgttgtctcatcctcaatcataattttcttgaaatcatggcttggatatactagcagggaatgtttacccaattataattaattaaaatagatagatcactattaaaaatgtttgcccatgtcctacccatgtttaatctgatagaacttgtggcagctaataacaagttgagaataggtgagcctttcccagaaaataggggccatttgatttagatttcacaagtctttcctccttgcttccctctctcctttaaaactttactaagcacctactaggtgccatgcctagggcatgagctggggataccagcatgagtcttggccccaacttgcttggctccgtggggagagtcaagacaccagccattcgtgtgctggggaggcccagtggtaggcctatttctagctgccctatggtgcccttcacatacaatttcatctgaagtttccttacattcctggccaaactcactgtatgtggtgttttctgtttgcctatgagcagagggtcctctgcgtgttctctgaggaagtgccatgtgcctcatgcttgcctccccttggacatctcttccaatacaagccctccatcctgttgatttatggtggccacgggcagtgtctaggcatgggaagcacctggaggaaccttgctgtgcctgtgggatagtttgctagggcagctgtaacaaagtaccacaaatggggtggcttatgcaacagacatgtatcatctcacagttctggaggttggaagttcaagatcaaggtgttggcaggattggttccttctgagggctgtgagggggatttgtccctgcctttgtactagctgctgagggtttgctcaacctttggccttccttggcttgtggcagcatcaccctgatctctggcttcttcttcccatggccttctccctgtgtctgtctcgcaatttctccttcttatgaggatgccagccatgttggattagggcttactctaatgacctcattttaatttgattatctctgtaaaaaccctatttccagataaggccaaattcgcaggtactggagttagaactctggcatatgaattttggaaggggacacagttcaactcatactgagtcaaactggcagggtgggacagtgacaaacgaggagccttccgcggggaccatggtgggtgagttgagctggactctcctcccaggcctctcactgtggggtgtcatgcttagtgaagcttgctcgttccttttgtgcatttggtcattcattcagctgcacagtgatactcagtggctcattcccacactgatttgctcattcacacattatgcacttcatttgttcattcattcagcaactacaataatattcaatgacttcctccttccctgtatcattcatacatcgacactcatcccatcattcattcatttgaacacttctcaagggcagatggagccctgtcctgcaccatctctgtgtaaaagctgaagccaaattttaataacacattcctttccatcagagtgctcttcagggctcagaaagtgggagcactgctgagttctatccaaggaaagggaatcattatatcaaagggttacttgacccctatgtttactgtggcactgttcacaatagcaaagatgtggaatcaacctaagtgtccatcagtggctgaatggataatgaaaatgtggtatactcagtggactattaatcagccataaaaagaatgaaattatgtcatttgcaaattatgtcaatttcatcatcaatgacaatgaaattatgtcattgcataaattaggtcattatcttaagtgaaataagacgggcacaaaaaggcaaatatcacatgttctcatttatatgtgggaatgaaaacatttgaacacgtggcggtagcgggtagaatgatagttctcagagactgagatggacgagtgggagggagaggggaggatgaagagaagtggattaaagcgtacaaacatttagaaagatagaaggaataaattcaatgtttgatgtcagagcagggtgactatacttaacaaaaacatattgtgcttgggtgatggacaccatggcttgatcgctacacataacatgcaagtaaccaaatttctcacgcaccccatacatttgcgcacgtaagaaaataataaaaaagaaagtggagagggatttatttttgtctactatttgttttgaacagatggactattgagctatctccacttcttcaaagtggctgtcacttgatttcttggctacttctactcagaataatgggaatttcccccaccctcccccagactggtcagatggagagctctgtcctgggtgcatttgtttaaaaccagagcgcctgtctgctgcggtcctgactgtccatatctctgagcaagaggagagagagcccaggtgctcagtcctgtcagccaggcagggcatgtgggtctcttctttttgaccctctgttgtgtccaggtccttaatcttgctctgaggattccagccaagtgatgatgtttcatcactgatcgtggtgccttgggcagcttcaccctggcatcaagtggtgcccaccttatgatccggagctcaatggagcttgagagtgcccttagttgtccctggaagacaggtgtgcatgccagcttcctgccagcagggccgggcccagcctccttcaccccctggatcattccagcaggaggcaagaaaacatcatcactagcaaaccctgtttccaggctgcataaccacacccccagggaacccaccagacagttatactgttggggtgcacaatggaaagcaaaactgtcccaggaagaagccagtggcttctgtgcgatggctactctcccagcacacagatgaagtctggcttcaccctaccccagtgtgtaacagggaataaacaccagtccccctgctgcacagagctggagtgtaactgaaaggaggttgtgctgaataaattggtccctccctcaggggtgctctgttggagagaaaggctgtgtgatgagtatggattcgtctgtttagatgtttctggagtctccatttggctaatcattttaatcagaatttatttcacttactgcaatatctgggggtgttaatgcctcctcctaaatcccttcaacaaacaaagattttttaattactaacaaacaacttacaaactggaaacatgagtggaggttgtagctctttatttattctttattctcaatactcacaaagccacacatctggatgagaatttctggaaaaattccatcagctatcttcatgtttccaaatattatggctttggcattgggtagatgacataacagaattaaaaagcatttcatctcacctccgtgctgtgtaggcactagcgtgtgctatacaggcacctgcgcctttcctagactgcagcagtgtgtgtgcagtgaggacaagtaaaccacttgtttttgtacactagcaaaggccctatactatctccttggtgtagagttaggtctgagaccgtggaaaggggtggggtaggtggatgaaaacccatgaagaaaagctgacgttaaaaaggagagatgttcactgtgctgatcagaccgagctcccttgggcttttgagggtaattattttctccttactaatttggaaagaattcatcttactttatttctatactgctatctttaattacctctgctactgaaaacgtatctgtatttcctgagatgtgtttacatttctttacccaataaaataaaaaaaaacgaaagagtagttatggactcctctgggtaagatgaggaaataacttgtattgtctgagaaaaaacatcgactggcccgaaaaatggctggacattgcctttcccatgagtcttcttttagctccctacctgtttcaaattgcagaagcttctcctggcacctggcccttggttagtgataaatcttagtttaccattttcatcctcgtgtgagctatgatagatttttttttggaggaaagttgactgaggtatggattgttgccagacactaccttaaacttgaacgtctgaaatataaaacttaccttgttcctctgcataaaacatatccacacttcctgacgaccccagaataatgtcctgctcctttagctcccagaaggcccttagagactaggctacctttccttcacccccggttcctcccatcttcctctcacctgacagtaacagcaaatgactcacagtttcttcctcgcaccagccccttctcccctctcttggcatctgctcacgcaggtgtctctgcctcccactctctttcacttcactattcctttcacccttcaacatttactcaggttctgcctcctcctccaggaagctgttcctgaccacctctcccactggctggggcagttcctctcatggtagtctgggtttccctctcctttactagatcccaaattatatgcaccacaatatggatcatttatgtatctccaagtagaccatgagctcttcaaggctgcacttgccccacctccccaccacctccctcagcatgcctatagcacagaacctggcaggtaatgagtgctctgaaaatatttgttatcatctgtaaaaagaaagatgtcaatgttggcttactaaaaaaggaaggcttatgagtttaatggagcaagggcaaaactagaaaaaggcaatggcttggatttgcagaaaggtgttgctttcagaggctgtaatctgagttattatttgctgagcatctcacgctatatcacgttgcacctgtgagagtattgtggacgcagttttgtggatgatggaccagagacccagaggttaaggaacttgccgagcttctataacatgaaaggcagagccaggatgcaagtcattgtgctaccagcctgttgcatttgagatctgtgcagttataccaggtggggtggacattctgagtggcagcaggtctgctctatcttcccaggacagtgagcccatttccctgctgtcccagtgagctctctcagcacaggctggatatgggttgtctgtacctgtgtgtgcctattgtgaagcgggggcattctccaattgagcctgttcctaagcagttattcttgttggaattttaaaatcagccaaagcaatgaaaaacattcacataagttacctcaatactggaagcagataagctgagggttgcacacccagaggccaccttttttcaaattcacctgcagtgtgtcagcttggggtcagggtgaggtgcaggattggcccctggagatgcaggtcacagatgaatgccttttcagtggcttgcagggagggagatgtgcatgcagtggttctcttcccagatgcttccctctttattggtttctctccattagcctgagagctcctccagggtaagagcaagatgggattaatcctgttactctctgtatcagctgggcctagctcagtgcctggaatagtcaatgaatgtttgttgaaagactacttaacacacagatgagtgggtggatgtaggcatgtgtgcagggatggatgaggggccaggaagaagtgtctgggtcatatcacagagatgctttcttgtgggctgtcctgaaggttctgagaaggctgatggatagttcccagtgtccactgtggagagaaaggagcttcggcaccctgcaggattcccttcaccagctcctgttccagacactaatggcaggcaggatggatgtcaggaaaaggcatctggtgcctgtgcccatcccagcctggtcagggcagcatttaagataataatcttaatttatgccaggaagaaatagcctccctatggaaggtttgattctggaaagacactctctggtagagatggggctgggcaaggggtatggaccacacagtctgaccctgctcccatcaggggtgcatgctttgatttccacaactggcacagacactcccagtgccccaatgccttcttccaaggctggatggctgttactcctctggttagcccagcccagaggaatttaattccagaaacgcttccaagctctgaggaggaataacaggccaatggggaggtaagcatgagatgcaggaagcataaattatcggctttccattccacatcacttctgagagatggtctctcaaactccaaagagctggcacaaccacagcacctctctacccaggctcctggctttccttctgcaagctcattgccctctacaggcaccatatcacgacccacaatgacccaggagtttcttcttcggcatccctgtcttcccatggccaagagtgagtggcccctctcccctcacccatgcaccactcacttggggctttctgggtcttctgcaccaggaatgatttttatctacacatcacaccccagctgaggcatagaggagtgttatggctaacaggaaatgaagacgctggctggactagcttgccttgtaacttcccggacatcttttccactgaaaacaaggttcagcatggtcttactgatgaagcttcttggccgttcaggatgtcggggaaggaggcactcttttatttatttatttatttagagacggagtctcactctgtctcccaggctagagtgcagtggtgcgatctcggctcactgccagctccgcctcccgggttcacgccattctcctgcctcagcctcctgagtagctggaactacaggcacccgccaccacaccgtgccaattttttgtatgtttggtagagacggggtttcaccgtgttagccagggtggtctcgatctcctgacctcatgatccgcccgcctcggcctcccaaagtgctgggattacaggcgtgagccactgtgcctggccgggaagcactcttgactgcagccctctcagggcgaggctctctggtctggagcagctccatcccctggtccccagcccctgaaagctgggttctgattataattctgctcacatcacctccccttggcaactgttacatcatcgtgtctgcagtggcaggtttgcagcaaacctggcccaggtgagcagagccccctcctgccagcagctgtcattagagagcctgaagtgcataaacacctccacgccctgcccttccctggcccatcctcagtcctcccaacctaaccttccccagcagtctgcatatactcccccttcccacagcttctccaggaaattgttgggtctaatcaagctggagactaggggcctgtggagcagattggagtttctgactgtggcaggacttgctggacactgggcagggggtgattggaggcagaatggcaagcccgtgagaaaggagcctctctttcctcccaactcctgatcacgcatgctgcctgccagcagagagggcacttggacagtaattaatacctacaaaggggtggcacatttcactgttggttttgttttgattggagtgaggctatctgccttcttaggatgcctgtgtccttgggtgacaccatctgagcaagttgcctccctagacgctcatcacagagcacattttaattcagctggagcgtgtgtgacagtatctgaggcaccgtcgctggcagtaggcttctttacctttattgaagctgttagctctttaggcaggagccccacgtgggaacatttgcctcaatctattgaccagtgaaatatacattctgaattaaaatgtagggtatgttttataattgggaatcagagaggtggcaagtggttagtttcttgccaagcaatatgtgaaggttctatttggggatggcgaggaacgcacagaatggtgatttgaactcctcagtggggggaagttttctctctccctgctggtctttcagctttcagtctggtatatattttcagatctttttttagagctccattctctcttctcctgacttcacatagccccttgtaaacatggggaagtaacgtggtgacatgcaaatatgtttgcatgaatttcagcatcaaccacacctgggtcacatcttgcctttgccactgaggagccatgtgaccttggccaagtcactgtcccattccgagcctcagtttccttatctgtaaatggcgacgttttcccatactccacaagtttgctgaggaacgttagtgaaatagtgaatggaaagtgtctaacacagagccaggcacaaaacagtgttccaaaaatcgtagttctaatcccctctccttttctccctgcttaagtctgactccttggaagcagagcctggcattgcagaagtgatttatccagggagagctctctggtaaaatccttaaggatgtggaggtagcaggatggggcaggggaggaagcttggcacagcggggtctcagctgagttcaggccttggcctgatcttaaggggagctctggcataggaatggcaccacagagtcatcatggcttgaggctaaagggctggagttttgtgccccatagtgctcactcactgactgtgggccaccccagttggagggcatagccttccaggcctttctgtgtgaggcagaggcctttgcagttctcaggggcctttgccccagccgctggggatgggcacacccggtggtggaggggatctgggtggggaaccgcagtgcctgtcaccttccccttgcctattttaaaaccttttatcccaagagttttaaaaaatcagctgtaaatataagcatgctcaagaaagttttaactacattcccaaatacctgatgcctcccagtttgtagattctctggctttttggggtgaggtctgtgaaacgctctttacttacgcagtcccttggtgcgcaatatcctggactagccacagggcaagcctgacctgcctcgtgactcaaaagtggtggagatgcaggctgctgctgtctcaggatcagttccaaattgagaagctccccaggtttaattggccaaccctccagcgtgcatgcagagcgcggaggctctgtactgctggagccgcctctaatcagcatttgctaaggtttattaacaccttatcagtacttgggacggctcagtgtatactcccttgtcagtggcattatctcacgctaggaaatctgaaaacattagatggcgaaggcatcctgcgtgcctcattagttgttcaaagtgtgcatggtttgaggaccattaagggggattccatcagctctatgcgctattaaggaaggggtgattgataggtgagtcctatctggaggctttgtagtttcaagggcttcatgacaggtgtgacagtggcccgcggaaagccccaggccctaccagcacctatgggatgcttgtgccggcgcggcccctaccaagcgttctgggctgtggctcttggtgtttgccatctaagcccattgccactctgcagtgacatctaggcacatttccttaaaggggaggaggtggcctgatgacaggaaagagcacacagagcctcctaacttaggcaatggcttgaatttgcagaagagtgttgctttcagaggctgttaactgagttatcatttgctgagcatatcacattatatcacatcacacctgcaagagtattgtggacccagttttgcagctgatgggccagagactcagaggttaaggaacttgctgagcttccatagcatgatgggcagagccaggatacaaacttgggtttgacctccctcagctctgccacttataaactgtgtgaacttgggtacttgggtgcattcttcagtctcctcatctggaaaatggggatgagtgtcctctcttagggctaaaaattgtaatacccctggcacacagcccattggaaaattctagacacatattagctgctcaactgtcagtaacagttcttattatcactcctggatttcaactcccagcttgggtttgagcttgtgggatgtgtgcagtccctcctggcaggtccttgggtcggagccaccgtggagcaacatccctgaattcgtctctctgggaaggggctgccgggctgggggatgtgataaataactttcttccgaatcgagtcttacatttcagtcaactcagcctcctgctatgtgtgggcaattgcaccatcttaataccgctcttccccctctttaatctgtcttttcagaatgttctgtcaattagaaaatgcttgtcagctaagtgactactcaggaaaacaacttacatgacttctccagcacttgaagaatttaaaataatgtcaggggattaacttgcagggaaaggcattgttaggaaggagggctgctattcagaactgcctcccagtctgtacagtttcattaataacacctttcattctgtagcccctcacatctagaaggatcttgagtgattaacagatgctttgaataggaattacttcatcttctgctgaaatatcacttctccttggagctgcaagcatttgattgtcaccatccttgtcatgccagacataggagggctgaggctgcctcgtggtcagtcttgctgctccaaattagaggggtataaataatcaccaagtgaattagtttaattctgcagaagttcctgagccctgactaagggcctggctttgtgttaggtgctagggaggcaggaatcagaaatagctcctgccccaaaagatcccactggctaggaaatagacaggtaaagagcacctggccacagggcaggggagtgcatgcaacagaatttgaatgcatgtggctgggagctggcccaggactcagctgtgctggagccaaggccggaaggatgggggtatgaggtagagaagggtggcagagggcacagattggccttgctgcttggaccagagtccacagagctgcagcagaagttctcagaggggcaggtatcataatcccctggagggcttgctgcagcacagacttctgggctctaaccttggagtttctcactcagtagatctaggacagacctgggaatttgcatttctagcacatttccaggtgatgctgacgctgctggtccaggagcgcacttggagaaccactgtgccagaggattgccagagggttgcaatctcagatagatgtctatggaggccagtgagggaggccgggtggtggccctagtggggtgctcagccaagtgggaagcatgcaccccgtgcaaagagaacagctgctcctgagccacagcctctggctgctacatggtaatgtgggatgagcgttactagattttctgctcagtctggaaagaatgggaatctcaatttttaatataaaatgttatttttatgatgccacatgggtctgaggaaatgcatttgcaggcttcatgtggccagcgagttttcagtttgtcttctttcttttaaagaatgaataggaattttccaggcagctggggagggaaaggacttttatgcaaaggaatccacaggtgcaaatgcctggaataagatgctctgagtggggaagtgtgaggctttctgattggctggagcatcatggttgctgggtactggggagtggaaaggaggagttgtcggagaggtgagaggtagcagggaagggcccatggagcttggagaaggtttagatttgatttctgactccagcatggccagctttgcctaccaaccttggttcctctgtgttctgggatggaggaaacatttgatacccattgcagctggcccagcacactgaggcaggcactgtgccctcagggagccatgcggagttctgatgcctagcacctctggtaacttgcatcccttccaggccagcttctgtgaggcagcggtgcctcccttaggggagggacctcttgtccctgtctccccagaagaggaaccaggaggccttttttcatcacagacgttgtgctcaacatcttgtcctgagagggtctttggatcagacagactcaggctgggtctcatgtgcactttgggcaagttgctagaactttctcaaactctgttcctcagctataaaatgggaaaaatgtttgtgaacattgataaaattatttttaatgtaagtaggccaatagattgtttttctaagctatgtgctttttaggagattatacattatcatggcagagaaaacataaatatataaacagccataaaggaaaaaaaacgaacaatttaaaattacacaagttcccagtaccttgagataaacatcattaatatctttgtatctcttcttctagatcgggggttgacacactcttttttaaagggccaggtagtaaatagcgttggtttgtagcatatatggtctctgctgcaactcttcatctctatacttaggcctgacagtagctacagacagttcatgaacaaatgcatatgggtgtgctttaataaaactttatttataaaaacaggcccctgagttgagtttgttgaccctctttctagactttctacaaagttccatgtatcctttattttataaatatggaagtattcctactttttcttctttggtctgacttttcacatcacagtatatcatggaagtcttccatatcaatatatattcacttacatttttatttctaaaagctgcaaagtatatcttacaatagcagattggttaagcacattatggttctattcataatttatttaagcatctggtactgttggatgcttttccaattcatttttactgaaacatgatgctgaggataagatgtatcttacactgttgcacacttgcccagttttgaaataacctttttggagtctgggcactgtagttattggagaagtgcaggctgctctctctgggccctctcaggttcccgttctggcatttcccatcagtccatgttctccattgtccagttcaccatgagctcctttatgcttcccagcggctggcgtatgtttctctagcacctgtgggttttccactattactttgtcaattttatgtacattgtgtgtactcaccatttccacctgagcacaagcatatggacttcaggctttattttctccttgcttttgataagtgtgttccagggcagttgcctcagttgtcctgcctctgacaagagggagtggcattgttgccctcagtagtgaagacacatgggtgccaggtggggtggaggtggaggctccatcctgtctctcttcctgggctggggcttgtgacagattcctgaacggacccctgtattcatcccagagtgggtccctcccaagttctgggtaggacccaccaccctgaagaccttggagatgctcaggcaaggggagaggggtcctgttgatctgtccccagtgagcgatagtgagggaaagctttgggccccagtgagaggctgctgttagccctgggcatgtggtcagccacggccacaggacccacaacagccctgcctgtgccagacgggtgctgggcatggggttcacacagatgtggaagccatagtctcccctttcaaggagcttacggtctggaagggtaggtgagagcacatgactggtgggatatgagtgaagctggtgactggcatagtggcgatggctctgggagctaataatcatggtggggactccaccaggtactttgtattcctacacagactccccatgacagtgcagcaaggtaggcatttgtctagggcaggcttcttccaagcagaccttgaaatgagggttctggtacaagtctttcctaagaaggtgctcgcagaggagtctgggaagggtggggaaaacaggacagggaagggccagaagcaggggtggaagcgaatctgagtgggacctccggagaagacccctagatgtcagaccgagctccgggtgctctggggggtgagttacaccctggaatgtccccgaggcaaagggagctgggccatcataccctcaccctcatcttaagtgtgcgtgtgtgtgtgtctgtgtgtgtgtatgagatgctcaggcccttccaggcctctctgcctgcgggcaacatggctccaggagccagaaagccattctctgaataagagccccaggtaggtgccgggggtaagatgcaaagcacaacaaagttttgccctcatttaaccagaatgttgctatccccattgcacagttggagaagcgaaagcacagaacagatggtgggctcatctgcagactgtgggaaagccaggattgtcgctcagcctgttgagtgctttctctgatgtccataggggtgtctaagggagagaatacagtcatgggctcttagtttctatttctggttgggccagtaaagctgcttcctcatctcttttctgcttatcactagagaaagaaattaagaacccctgcttcagcctgctaaaagcccaaaacaaaaccaaacagaacaacaacaaaataaggcaggttgaacaggctcgtgacatagagaggtgaatctggcctttggggaatgggagcactccaggtggattcctgcaggaggagtcttggtgaagcctgagcatgcagggatggcccttggagcactggcaggagggacagaagcaggctgggtctgagggaggcaggtgagtcctgcatgatggggacctccagaggggtctgggggagcagcagccatctggaatcacagtgccaggctttgcttcaccttgctgagtggagaggggtcttgactgcatctcactggcttttctttgaggaataggaacctggcagtggtgagcaggacagattggagagggcgagccagacggcagggctgctattttgaagctgatgtctactgggaggtggctgctttcacaatggaaagggagtcctagacagacaggatcctctctggatcccttcctgggaaggggccagggaagagggaagagtcagaggccaggccaaggcttgagggattctttgcagtgccctgcagacgtggaactatagtgggagctgggagttgttatttggttctcttgagctgcctttggcaattcaagtggtggagctgctcggagctgctggaaggtaattggattggagggtcctgagctctgcagagaaagatgccagtgctgcagatgtgagtggaaagtgaagcctgtagagtacccccaggaggtgggggtgggagaaggatagtggaggcaccaggaagggccagtgccatgggggccaaggtgagagagaccactagaaggatggtgcaggcaactggggaggcatagggagtcctgcggggtggaggctgctctgccttctctttggaaaggggcgcattgtagagtcaactgatctgctagtgcctgccagctctgttgggaggtggatacccagaggccttgacatctgtcaaggagggagctgcctgtggacaggggaccagtctatggagagtacaaggcatccaaggagcttgctggccatggtgcagtagctgtggcctggaggctggagtcttgagcctggactaggtgccgtgtcctctggagggactgagtgagacacagcctgaggttctgttccccacaaactcaggagcactgttcatgtgctgaaaccagtccaggccagcgccctgctgtggtggagcatccgacacccggggacacctgacatggttaagtgacccgggctttagagcggggcagatggggctataatcctggctgtgacttttgtgcctgtgcccctgagctgctcagcctccaaggcctccctggatgtgatctctcaccaatatactggggatatgctccctccaaagtctgggtgcccacattgggtgctctggctggtgggttcagatctatcttgtgggtagaattgggcaagcttcccacttcgcccctgtagctagttcctataaatgctggaatacagaacatctcctaatagaaagtgctttatgcattttcccagtggggaaatcctatatttaggggagggggtcaacttgtagttgaacataaaaactcttagggaagcagatgaaagactttatgtctatttgtagcatttgatttattaatttagttacacatacatatttaaattcccatgccatgtaaaatagtatttaatttagaaatctgctttttttccccttctggcagttatggagcaattttattcaaagccttcccaggccccatcattgccagagccactgtgcgtagcattgaacacaattttccagggcacagaatctccacttccatcatagttgtttgagacccaacactttgtggctttgtgtaaaatgctgtcactggagaatttatcacaagctacgtatactcgtttgcataatattaggagagtgttttttttattttcatttttttctttaggtatatatctatgatcttcatagtgtaactacttctgatattgctttttaaagtgatttgtaaaagacttgtttagaacaacatccccagcttgtaattctaaggtcaaacccaggaataattattaaataggggttaaatatctttgccttctcttttaacgattccatcaagcaaactcttatgagcatccaaaactagcattgattgaggtcatttcaggctaatgttttttccccaaatggtactttgttggttaaaataaagtaaatgagagaactgccctttaacaggagagtttgtcaggaatttgaatataagttcactcactcttcttattgaaggatgattttggaaaaaaaattacctttgccttttgcttggtcacagagagtagcagtggctccacaggtaattgttgttacattgaatgaatgcgcaaatctaaggatttcataaatacctgtgtatggcagaatgcctggcacatagtaggtgcgaactgaagacagttcttttctcttcctgagccccactgtatctttaccatctttgcatttaaggagtgacctgcaggttacttttgtctaccctctctcactcatgatgtaatcaggcccctgacaagcaagacctcttgatatccactcacacagcgagactcagaacgcttgtggaccagccgcacctgctccctttgcctgccttgtctgagaccacatggatcctcatcctccatgggtccgctttgtcatgacttattcaagggctttgcacgtgctgcttcctctgctggaatgcttttcccctgcctcctcctcctcatgagctcatatccatctctggtgacttcctctggtccctagatgagatcagtcatccctgctcaaactccatctgctgcccagtgttatgtcctcacagggcccagtacctgttcttcctagcgtttatccagctgcagtttagcatgcatttgggtgattatttgattgatgcatgtgtcctcccctaaattataagctcctcaagggctgggacctggtgtcccttcacagctgtgatccccatgctgagcatggtgccagacacacagcgggtgctcaagaaaatatttgctgcatgtttggctgagttcatggtgcctgcagattaagaagtttaatggaagatgaagggtggcatcttaacatcctgacctgcttcttgggtcttgaatcccctcccgcaggtctctggcagatgtcagtttctgtcattttgcacagatctgatgggctcaggaaatgaaggtacatggatgcccagaacttcgagctgtggtcattgtctctatacaatgtgtcacttctttctctggagagagtgagttggaccttttagtttaatcagccagttttggtatttctgggactcaggagtgtgggctgaaagttatcttaaaagatcactgtactggagaagctgaagttgtgggctaatggggaaccagttgtaatgaacatggagaggttggacttgatagctctcatgtcagcatgcctggaacctggggccggaaccatccaaaccaactagaaggtcacacagaaatgagctgagttctaccttgcttctacctgacctgttctgcacacaagtgttccatccagcctcttgctttctctcttcctttccataggagggctgggggaggaaggggggcccaggggtctcatttgtgcactccagcttcctcccttcctctctcccttccttcctccctttcttccccacttccatatcagatttttctggttttacttccccaaagctgatttctactcaaattttgatcccaagatctgcttctggggacacctaacctatgacacaatggatcctccatttcccaaggcaaaactcctagttagaattccacgaacatttctggagcgcacaccgcatgcctggcatagtgttagataatcaacatgcatgcgtaagccaaagcaggcatggctcctactctcctggggtttactgacttgtgggaaagacagacattaactaaacagttccatggccaggagaataaagtcaagatgcattagagtgtggagaaagaaagagatgtggttctgagagggagtaactgaggaaatggcccgaaactggagggtcagggaagacttccctgaggcagtggtccttgaggtgagacctgagagtgggaaaactgaaccaagtgggaaaactgatccctctgtgctgagggatgttagtcgaggaactgaaggaaattgggatgttgggaacccagcaagggaaggctacagtgaacacccgagggccaatggagtaggcaaaggttgagactgcagggtgtcgtcaaaggttatcatctttatttaagaacagagaagagccatggcttggttgatgcagtgcagctgcactaagcaggatggggatacaggccatgtctggccattgcagaagaaggtcatcccagacactggggaacctggcacatctgggaggttactatgtggtaccacagaaggcagagttctcatccacctcattcctgacctgaatcctaggtgacttctgtgaaatcttcagagaagtgactgcaggagggatctccttgaagacccaaatgtcctgttctctgaaaaggtttctttaatgctccttctactctgtctctctctccaagccaggattagttgccctctctgtgggctcacaaccctgtagaaacctctgtagagtcctctccactcactggagggttctcgagggccaggaccatgtcttgttagttggaatgcagcctgagtcccagggacagcagccctttatggatgtgctgaaggaacttcatcttcgctaagagttctaccacagtctaaagccaggcaaggggcagttcgccagctctgcaggaagcacaaggcatcttctgatgcttcgtggcatctcaaatgaggctctgtctttgcactgcagatgggcccgaggccctaggggctcctgattgctatgtggttttcaagcccttggaagggcctgccaggctgccatatgtatgggcaacagccaaatagcctccttaagctacagtctctgctataagatccaccacgtggctttgcagaggctgtgcgtgtgacctgggggctctgtctgctgcatgcagggagctgctgcctcaatgatgctggtgggcggaagcaacttcatttctttggctgtaaaggagacacccaggtcctaccatctgtctgtgctatgttaactgtgtggctcggcagtctgatttatggggaagggtttgggaatggggacaggtgggagtaggaattcataagcagatcctaagagttctggcttctggaactcaagattggcacccttgggacacgggttggaaatgagatgagaattcttgaaggacaattcttccttgttcttattacacctggaaaagcagatcagcttggtttggacaaatgagcacttccttgggagatctttgttgcaacatttcttttgcctttctatacagtctgaccttggccaattcatttgaatcatctggtcttcagcatcatcatctatagaaccaggaagttggagttaatgccctccaagtctgtttccagccttggaattccatgtgcctagaacatttaggattctgggacaactcaaggcaggaggcagccccaagggtgtggctgagaaatttgaagtggagtggagtccacctgctctggtcacagccctgaggctgggcaggaagctgtgaactccttattaagctttggaatctaactttgtcacctaccagctgtgagacgttgtctgcttagtgtgccataacaaaataccatagcctgggtggcttaaacaacagaaatttgtttttctcacatttctggaggctgggaagttcgatatcagggtactagcactgttggtttctggcaagggctctttttctggcttgcagacagctgcctcttttctgtgtcctcacatgagagagagagagagagagagagagaatgagagcacaggctctctggttctggcgtttcttctccttctccttctccttcttcttcttgttgttgttgagatgaagtctcactctgttgcccaggctggagtgcagtggcacaatctcggctcactgcaacctccgcctcctgggttcaagcaattctcctgtctcagcctcctgagtagctgggattacaggcgtgcaccatcatgtctgtctaatttttgtattttttgtagagacagggtttcaccatgttggccaggctggtctcaaactcctgacctcaagtggtccacctgcctcagcctcccaaagtgctaggattacaggggtctcttcttaaaagagcactaatcccatcatgaaggccccaccctcatgacctcatctaatgttaactatctctcacaggctacatctccaaataccatcacactgggtggttaaggattcaacatatgaattctgggtgtcgggacacaaacattcaatccataacagaaaagtttctttctcaacttgagtttagcagcaataatggtactcacctgtatccagttatttattgccataataatgcagtgtaactctccccaaacttgcagttttaggcaacaaccacgttttatttctcgtgatactacacgtcagctgggtaggtttgctttcctgggtcaggcttggctgatcgtgggtgaggtcactgatgtctgtggtcagcttaagttttggctggttgagggtggccttggctcatgtggcttttctccacatggtcttccatccccagcaggctagcccaggctcattctcatggaaatggcaagattcccagagagtgagtggaaatgggcaagagctcttgagatctaggctcagaagtggcacgtcacttccgcctcattctattggccaaagaaagtcacaatatctgcccaaagtcaagggatgaaatgtagaccccaccccctaatgggagaagctgcaaagtcacatggccaagagcagggatacagagaggactgggaagtgggaccatttttacagtgaatcttctacaccacctcatatccttgctgtgaggcttaaataagattgtgttcttatagtgcttgatagtgaaaacacattaagagatagctgctattatgttattattacacttaagagtttgcagagctagacacagggtcagccactttatgcagccaggggccaaaatgagaagtccctctggcctgagcctttgcagggcacactgctctctcctttacacccagggaggaaagctgtggataagtgaggggccctcacccagaagggggttggcaggacactgcttttgatcttcttttagagttaggggaagatcagcctaaatttgttgcctaaatccagcaacaagtcatctttgatgagagaagagggtcagcatattctcaaagaccaaccgcatcagctggagggggcttgactcccttccaggaatttctcttgtctctgatgcccactctggtttcaccttgcctgctgggtgctacccaccccaacccccagccccaactcgagtagacagaaaagcctgctctctgcctccctgtgagtcctgtggtatcgcactctgggccttcagagttgctcttttgcctgcctgggatgataacacttctggcttactatatgagttctgagaaggcattttcagggggtcatgagagttaagtggctttttggagcctggactaggcataaggacagaacttcatggcatagtatttgtgttttttttccatctacagactcctttattaaggttccattttaggcagaaggcctatttacaaaacatgggaaagtggaattactctggctgactgtgtgtgtaagagagcttgtgtatgtgtgtaaacgtgtgtgtgcatgtgtgcacacgtgtgtgagcatgtgcttatgcacacatatgagcatgtgtgtgcccatgcatgtgtaagtgtgtgtgtgtctgtgtagggatgggggccagcatgtggaggacagcctcaaatcctgcatctttcccctttccctgtctctcttgccctcagcagcccctgaggaaagcctctgaggaaagcttttggatttcaccatagcacagttttaaaaatattgcagtaaaggccaggcatggtggctcatgcctgtaatcccagcactttgggaggccgaggcgggcggatctcctgagttcgagaccagcctggcgaacacggcgaaaccccatctctactaaaaatacaaaaaaaattagccaggcatggtggcgcatgcctatagtcccagctactcaaggaggctgaggcaggagaattgcttgaaccagggaggcggaggttgcagtgagccaagattgcgccactgcactctagtctgggtgacagagggagactccatctcaaaaaaaaacaaaaaaacaaaaaaaaatggagcaaagaatcgagacaagtagatgtccacgagagtagctatctcagatatcaatcaacaaagctcagctttttcttttttctttgtaaataacttttgttttttattacacaaggaatatatattaattgtagaaaaattagaaaatattaatgtgcaaaaagaataaaagtcatccattaccccattccctgggataactgcagtgaatatgttagtgtatacctttgcagcggagggtaaacatctttttgtatcactaaatatgctgcagcataaatttggtgccttggcattccatcgtatgggaggccatgacttactaaattaatcacctgtttctgagcatttgtgtgtgaggtacagctttgtacctgtctttgagcacattcttagtgattttctttaaaaagatttctagatctacaattgctggggacaaagggcattcattgcctattgaaatgttttgaattatgaaatctgcatatgtgtgcacatacatattagttttatgtaatgtatatgaatagttcaaacatgttgtggtgtataattgtatgccttattccttcacaatcccaattatctgcctctagcactttgctttagttccacagagtttgactccctttcccattcttcttctctatgtttgttctttatctctgtagtaccagagtttcttttatttttgtgttctctgtgatctgttccattaacatttagttatctcattttttttaaacatatgtatctatctgtctattcatttaaaaagccgacagcacctggtattcccaggcagtctcccattcaagtactaaccaggcctaactctgcttaacttccaagattagaggagacaaggcgtgttcagggtggtagggccacagacatcatctgtctttgaagaaataactttaacatattcatttaatttttgaaaagtttcaaaaattaacagtgtaaaaaggtattgggtaaaaattctcccaagcttcactctatttcacccctccccactccctcagataaatatattattaattttttagagggggattttctagatttttaaaataattataagcagataagagtataaattcacattccttcacttctgtatgcaaatacaggtatgctatgtatactttttcttcacattgatttttttttattccatagcacgtcttaagaggtatttccgtattagaaaggcttgcctatttttctcaggtgcacagtagtttattgtgtagatgtgccataacctacttaaccagcttcctaatgataacatttagattccacccattcttgtgctatgaaaaattgtgctgcatagaataatcttgcaattaggtcagtttgcatttttgcaagtgtatctataaagataaatacataaaaatggaattgcagagtgaaaggatttttgcatttgtaattttggtagatactgcaaaattctcttccagaagggttgtgccaatttatattcccaccagcaatgtataagcgtgcctgtttttccatagttttgtcaacagaatgcgttatcaaacttttggatttttgccaatctgatggataaaaatagtatgagagcacagttttaatttgcatttctcttttgaacaagattaagcatcttatcacatgctcaggagttatttgtatttcattttctgcgagacatgtgttcatgtactttgcctatttttctactgatttttgggaaatctttatagcaggggttttataccttgatttttggcatgtgttgaaaatattgaaccagttcattgattttttttttttgccttttcccttcatgaaacagggtttgatttatatatggtaaaatcattggttcctttttcttttatgtcttctgaattttagttcataggaaaacattccctagtacaaagttataaaatatttccctcacttttcttacaagtatttttatggttccattttaaacgtttaaatctgaggtcctgttaaaggtttttttttttttttggtatataattatctaaatcccgtttattggaagtttatcttttcttcattgattttcattgttattttatagtatactaaaatcttgtgtatatgtgagtctgtttctagaaatggtattctgtttcattgatctttctgaggtctttcacatgtctgtaccacactgttttaattattgtagctttattctatatatttttaaatatatatatacacattttttttttgagacggagtttcactctggttgcccaggctggagtgcaatggcgcaatcttggctcacggcaacctctgtcccctgggttcaagtgattctccggcctcagcctcccaataatatgtatattttaatacttggtctgattaggtctctgtgcacctccagctattcttttttttttttttttaactttttttcctggttcttgtgattgtttgtttttcctttagagttttaaaatcagctcatctagtgcccaaaacacagcctattgacattccattgcaattgctttacatttataagttattatagtttagggaaaaccaatctttatgatattgagttctacccaagaacttggtgtatctttccatgtttttcattcctttttttgcacttttttgctgctatttaagagactgacttcatatagatttatgcagtcaaggtcagcttattcctaggtattttatcttgctatctgggtttgtaaatttttccccttctgctaaatcttcaaattcatcattgtttgactatgagaattactgaccttttaatattgattttgtactgcactcttgttaaattttctggtttttgcttaccagaagtggatcagcatttcttcatgtgtttttcagagttcttatacaagttcagccatgggtacacatttgaaaacttatccacacattattaaataaataaatgtttaaaatgtgtaaaattatttattaatttaatactaaacactacatatatacacacacatacttcttacaaatacttttgagcattgtaaattccaagtaggttttgccaatagagaaattgtgtgcctccttttaaaatgcttaagtggctaaatgttagaaacacagacatttcttataaagtgttactgacgccctgtctccttggtcacccctcttaagtgtattgacttgattttccagtgatccctgtgagccatctgtggaatcacgcctggctgagtctggtaggaacacacctgggtttgtgtgtgtgcatggatgccatcatttctcctttgcctgccacacattttgacaaagatggatgatcagaaaatcagattgagctctctggtgggtgtttaacatgtacacacatgtgtccctgtgaacggaggagagtctcacctttgcaaaccagctgtggaaggggcaacatagacattctattaaagaaacactgacaatagcttgctgggcttaaacgatgacaaaaagaagaagaagaagaggtgagttgcaggcagagcccaaatatgtctccaagaggaggttatgtatttctcaaaggcttggacaagtaagaatcatggatgaatctggtcccagaggtagtcaaagccaagcaatgcagccataaccactgacaggcctagtgccctggaaaatgcatgtcatctagagtcaccttgattctggcagggttcccattgctgggtaatggctggattttctcagtgccagtgagaagcagcctttgccttatccagggattaagcacgtctcttcctggtgtggcatagccggacttgctttctagttcagtcccccaatctcacaatcaggccaggcttttcctgggccatatagtagccgcatctccaccagttattcttattcaggaaataatatctttaagaggaaattttatgggtcaaaaatatctacactgctggaacgttgggtcaagtctaacaagatacaatttgatatggatcaatacaatgtgtaagagatcctcctgcaccatcccactcatctaatcaaagtatgttggtaggagtagagggggatgaggctgtggctgccacttaagaggctgctggaggcctggtcaattgctcagacactcagcatcatgtgatggtgacaggcctgttgtcaatacatgagttcacttctcagtcctgccgtttactggctaatgacttcagtaccaagttgcttaacttccctgagcctcctctcctcatctgtgaaacagggctagtggtagctccagcctcatggaatgacagaaagcaagacaacataggtaggaacttggcacaaggcttgatgcatagaagggctctttctggtttcagttcttgcactcattctgggagacaggtcaattaccatttccattttgtagagaagggactgagcttcagaaaggggaaggaaccaaagagccaaagcctgtagggcctttgagcttgcaaacctcccagcatgtcctccagtgtcccataatgttattattattacatgttgacactataaataaggtgagtcttcagtgggatgtgtcctgaataaaaagtgagtgtggctttaagccatgtggatctaccattttcagcttccaccccttcacatggtatttccaaacacaagcactcacccagaaccctggctccagaggggagaggcctttagcatcagctgggagtgttgccatgagcctcatgtgctggggcttcagcccaggcccctagcctggatctccttttccttgaaatgattttattcccaaatcttttggcatgcctctgctcctgggcctggaagagccactctggcctcccctgacaagtgcctgtaacttagaatattaaattgcaggtattggagttttggtgcctcttctcttagaggcctctgtaaggttttgaaggctccaaaggaagtaattacgtaaatagactcacaatcccaagggagtggctgcctctctgccctacttttacctaagatgggcactcaagtgatcctctagaggtcaaagaagtcaatgtcttctattctctattaaaaaaaatatggtactctgcttcgtatgcctatgaacttgaaatgaaataaatgcaaattagagccccttcctggtgatctctgatcctggaacctcaaaatactttgacttcttcactgggcatctggaatttgcttcccaaagtgaggaaaatgaacacatgttcatttgtgtgcaaggatggtgaacttgaggtcagggccaggagagcaaaaagcagaagctgacaaagggaatgcagtcaccgcattgccacatcaggtgtttccaatgaggacaaaacaaccgttattttcctcctgggaagtttcagtcggccagagaacaaaaatccaaatgccttcatcagcagagtttacgcctaagttcttgctaacctctgagaacagaagctcaatattacagcgagctccctagtttgtggttttgtggttgtttctatctaattagacacgtaatttcatttcgcagtcttgattaaaagtcatttttttccccctagaaaccacatctctgagtgcttctgctgcaccatggagggcactgaggtggctcctccgagattaacccaaaaatcatctccagcatcattgctgggttccaattaacccagagcttctttgatctcctcagtccttaatgtttacttcataacaatttgaaggcaaggagagggcagggttaggaactctgtttaggctgggcaatgtagcggtgctccccgcaaaagtactaattaaccatgaaattgtacacaccaccctattagcaacaagtcccttaacatccccattcactgggaataattgcctcatttctcagggctgcctctatgtcccaggaaaaagccaactctattaatcacctaaagcagaataagtgattttcagcttatgttttaataatgtgtgcccagctccagtctgtgtaagcaggggttggctctgctccacacttgtggattacagttctgcctgttgccagactaccttctcccaccagggcccaggtagctcaggaggctgagtcatttagatgagtatgtttcctgctggggagctgtctttgatgatgaactcaagtttggtattttcagtcattgaaggtgagacttcagtgagcttaacaaagattaattagttttgagaatgagcagctaattagtttcaaggcaatcatttgttctgatgctcagagaacatggtactgagccatggagaagtcctgcaacctctggtgtggccactgcctgactagagagagctgggggagcgcatgtggcctttttgctgccctgcagacctaggtggtatccccacttgactgcttgctaaccgtttgatctctctgagtctctgtcttttttttttttttttttttgaaatgggcttaaaaatttgtggcattattgttgggattcaaagcacttacagaggtaaagagattgcacataagtgatcaaaagttgtgagttttgtagggataattgtccagagatgagcaactggtatttccttttttgatagtttcacttgtcaagataacaatcccttcttcctctggtgggatggggagatgaatccaggtgtcaaggtgaatctagggttaactgttatatccaatctttattagaccaactcatggggggcaataaactttgggaggagaatgaagagagaaatttgtaattgtctacctgatgtgatcatgctgactattaacctggaactcagccacaggccactaagatctaggtgaaattgatatagggcaggcaagccccaagtggggcttagctcatgaaggttcctggatttgcccaggaaagaattcaagggcgagctggtggtagggtagaagaaaacagctttatggaagcagcagtgttgcagctctggtggtggtgcagctcagtgactgctcctgcaaagtagggtgctccacaggcagtgtgctgagattagcagctcagagcagttcgggagtcatattcacacctacttttaattacttgtaggttcgggggcggtttatgcagaaatttctaggggaagggtagtaacttctgggtcttcaggtcattgccatggaaaggggcaataactcctgggtgttgccatggcaatggtaaactgacatggcacaacggtgggtgtgtcttatgaaaagcatgcttctgccccatccctgttttagctagtcctcaatttggtccggtgtctgagccctgactccagagttgagtcccacctcctacttcaaaatcacctgaaaatcccctgctcaagtccatggccagtggaagtccaaagctcactcagagatctccccaagagtttgtaaaccactggcatcctttctctctaaactacggtttcagccagtgcagcctctgtcttgcaccacacctttcccaatgtgaaccttagtcctcctctgtttccaaccataacaacggccttcacaccaatgaccagtcattatgacaattggtcatgaagattgatagatgttccttaagatttgctggatggagtattcagagacagtcaaccaccactcggtgcctcgccttccttccaccatctcactctctcactctctctccccactctctctccatctcttttgcttatcttcatcctcccagagggtctcaggagccccatatgcttctcttgtattatataagccacattcctctcctctgaagctttggagccaggctaccctgaggaccgacgtgactcgtctgttgttgccctaagtgtctcttcctaaggaaaatcgcagtctcgcttgtcaaaataatttcccctaccatattactctgttgatcgacacattgtatgtccattttgctctacagtactgctccagcatgtgtagatgtggtcacccagtgcttcgagacctcggtccaaaaagccactgcagtggttgcaagtgaagatttccgaagcagagtcagggtttgaattccaactctgccattaatagttgcataaccctgggcaaataacctaatctccccatgcctcagtttcctcatgtgaaactggaagcaataacagaatctaccacaatgtgttattgtgtggattgaatgagttaatacaaatcaagagtattgactcttgacaacacttgctacatactctttgcatatgaacaatttcccctaaattgcaggctgcgccggagcaaggatttgtggtccttgcatcccagtgtcaagaggagggcctggtacatagtagttgccaataaacatctgaggaatgaatatgcaatgagtttgtgtgattctgcctggcactgactcagggccctgggatgctcttgcgctccaccaaggctccttgctacagcatccagttcggcagtctacacagaatgtacttttggcctgtatgagataacctgcaaaacgagccaccaagttctacccaagaacaaagggtattgcttctcctctagcagagaaaagtgtgatttctgcaaggtcccccgaagcctggaaatcactcatgttgctctcttcccctgccacatactatggttgcacatctctaagagttggggattccatgggggaccctgtaacggcacctctgtgatatgataaatagatgtgcctcttttgagtaaggtttttaggggaggtgaggtctcaggaccctgggaaaaccaggtgggctataattcaccctcggtggacatgcagatgagagggtagcttttatgaatgcctaattcttctttactaagcaaatcgggtatcttctgttgatcagcaatgtcccagttctagcactgcagaaagaccagcaaaaagaccagcaattaaaatgtaaccgaggtaaagtcactcactagcatgtcaaaagccattaagccaatgctggtttataagtttatgtgctatgattagcaagcaagtagggaaacgaagcaggtctttacctagaattttaaaaataaacaatgcaatgaaatgccattagccacttcaccccttcattcagcaaacatttatatggcacttattatgtgcttgccacttgctagactctggggatggagtttaacacagtgtagttcatttcctgaccttgaaaaccctgctatcttgagcagtgtttctgtgtgggggcttggtaaaatatctgacatttctttagtggactattgaaaacagatgtaaaactggtattatataataatctgtaactcactttcttactattgagcacatgtaggtaatgtttattaagtctttcaatgatcatgttaaaagagcttcattttcattttctattggcatgcattaatcatcactaaaatttgaaatctcacatgctcatatcgcttggggataattcaccttgtaggtaaagatccagttatttaaagttctagaaaatgcaagtttttgtagatttgtgagattcagtgtaagggctgacatttgggaaacaaatggaggatgtgagaagaaactgtatttgttaaagtgttcaaaaatcctgtagttggattatttatgatgcattgtacagttccggagcggttttattgaattcaattgagctgtgaatttgccagagatcagattgaagctctggctggatgcagagccaaggtaggtcacctatagcctgcagcctgcccacctgtgccctttcctgctcctccaggccccagcctgccagtaatgagggcaaggatcaccaggctgccagcaacaggcccgcaggagagctgcaggctcaggcctgcaggatgcactcccaggggaggactgccttgggctccctggcttcctccaggtgcagctccatgcccctggctgtcaggaaggtctgccttatgtcagtctaattccatcgaggtatagagggagctcttttccagtgtcttgtccccagattcttgatagccttcttctgaggggtctggcaagatggaggacaagggctggtagagaggagagttccgggagaaagtccctggctggttgcctgtgatgaggggcttggggcttgggagaatgttccccagttggggatttcaggtatatctttgtgtgtacgaaggtatgtaactccactctctgatgtctaataaaatagacactttctttttttttggaaactcagtcttgctctgtcacccaggctggattgcagtggagtgattgatctcggctcgctgctgccttgacctcactggctcaagggatccttccacctcagcctcccgagtagctgggaatacaggcacacaccaccatgcccagctaatttttacttttttgtagagatggggtcttactatgttgccctggctgatcttgaactcctgggctcaagtgatgctattgccccagcctccgaaagcacgaggattgcaagtgtaagccactgtgcccaggctagaataaacatcttgatggcttctcagaaagttttttctctgtgttggcatcttgggctttctatgatgtttagaggtaaagatgaagatgctctgagtacagcttggccattcaagcaagggcagggccaccacctcctcctggcaagtcccctagttcctgtggagttctttggtgcatcctgtaggtcttgagtttgctgttagcctacagtttgggtgttacaataccccctgctatttccaggcccccatgctccagaagcttcttggaccactgagcttccagttgatgcccacagagcccctgctctccccttggtcctgggactctgctcaggtagggctttatctctcctggtgaagcccctcttcctggtatccctttcctccaggtactgtggcccacactgtgcacccagaggcttccctgactctcatggagcctcccagtcttcagcatcctcttgggctgtgagcctggagtctgtggggccagaggcgtgagtatcaggccaggctgacttctctcagctgaggagagaccccagggacacagaaaaacctcctgtctgtcccaggggggattgcgaaagccatctttctggaaggaaggtggctttaaggactggatgaacttctttagagaatttggctgaagccctcataaggcccctctggagaccctcccagtttcccccttgcatggcgagggctgtctgaggagctggtggacctgttcctctttcagcttggtggttgggaaagggctgccactaagcaagagggttggctttgattggtccccttaaataaatccccaggttaaagctggcagcaagataggaaggttcacctacccaggtgggaggcctgacagggtcctcagtagcaggcagcgtgaggccagatatccatggtaagggacatgtgaacatcctgggtgaaaagtggtggaaattgtcagggctccagcaggcagctctacactcacactcctcctttcagatgacaaagctgataatcttggggtttacatagtgactcttgggtcacagacttgatgttagtgttctgtctcacacattgtaatagctctgagtgacacaacagattttacagattaggaaaccgaggcttgatggtcaggggacctgtcctgggttatctagctagaatgatggggtactgggctttgaacccaggaagagtgactcccaagcctgtactcaggatactcaggctgctccaggtgcatcccctgactggccccactatggaaagcaatccatcggcacctgcaagccccctcttttcaggtctctacccaatacacagcactggccagggaggtttctaaataaggtcagctttcttgtggatcatggaacaggatgtggctaatgcacttgcagctcaaacatgcttgcatttctccctaagcccttggaggcagtaatggtgcaagcagatgcacattttgctctgttgttgtggtgtttgcaagacttcacgccttccaggaggcctcactagggctcaagggcctgcccaaccactcacaccctgggttggtttgcaggaaacagatgtcagcagacctgccttaataatggctggaccaaggagctctgggaggtctccgtgtggatgaataggtggagtgaagtggttagcaccaacacaaatggacagccacatcttgcatgacacatgtaagcaagtgtgagagagaggctgagtgggaaagaggacaagtatcaggaactgcgcaggagaggagaggcagaaggaggcagagcccagagagagccgagttgtgcagctgcaacctgaattctaccattgtggagacagccccaccttgggctgctgagcacttggatcttgttgcccagagaccaactttaaaaaaaaattgacacataataattgtacatattttgggggtaccgtgtgatgttttaacacttgcatacattgtgtaattatcagatcggggtaattagcatatccatcaccttaaacattggtcatttctttgttgtgggaacattcaaaattctctcttttaattatttgaaatatacaatacactattgttagctatagtcaccctactttgcaatggatcagaagaatttattcctcctatctaacataacaaacgttaacaatgtactcattggccaacctctccccatttcccccttgcccttttctcctcagtctctggtaaccacaattctactctcaacttctatgagatgggcttttttttttttttttttttaagatatgagtgagatcatgtagtatttggctttctgtgcctggctaattcccttaacgtaatgactcatccatgttgtcacaaatgacaaatttcatcattttttatggctgaatagtattctgttttatatataacacattttctttatctgttcatccattgatgggcactaagtttatcttgactattgtgaatagcactgcaataaacgtgggagtgcaggcatctcttcaacatactgattttatttcctttggatatataccctgtagttggattgctgggtcatacagtagatctatttttaagtttttgaggaaactgcatactgtttttcatgatgactatactcatttacattcccatgaacagtgtataaggattcccatttccagagaccatcttaactctgctttttcaggccccacaacagtggatgccctacctgaaatgcggcaggcactcagtgcttctcagattgcatcccgttctgtggagaaaagactcagacctctcctccaggggcttctgatccacagggggagagtgacaagttgacagataattaccactccatgtgctagtcttttcctgtcacacaagttctggcttccaagggctaattatttatacctgactcttctgtgagttctgcactaattcagaagcatacatacaagtgagatagagagaaacgtctctattttattggtggattaaagacctgttttggagctgagaccaaaaatggattttccactatttcccgacaaatgcattgcttaggacctacgcgttgagacagttggtctgtagatctgatccttgtttggtcaactgctgggggatcccagcctgggcctcagctcgcccttctactcactcttgctggccaccactagagttaggtgagccagtggctgtcaaactcttcccttctcaccaagcaggtaaaacctttctcttcccaaggagagaagcttgtgaaaggtgaagaaaaggacaacagctttttaaaaatacatttaaggggtaaaatttcttaattaaaatctgagataaaacatggggaaagggagcaagtggtccctcataatgattcattaacatgggctagaaaaactcagaaaggggttttgaagggtgaagaggagctgttccaggtagtccaataggtaccaaaagggaattttaagtggaactatttattcacagagtggtgaattgacatgagctgtgtcatgaactccagaactgccaaggttgagggtggaggaataggggaaaatgaccatagagaggttaggagtgaggaatgacaaggtcctatttgcattctgattctctttctagttgagcatatgagggaaggaagggaagtggggagatgaaagaaaagtggttagctaggagacaatggaatagtcttggcagatgttcaagacctaaaggaaagaagtggtggtagggatataccgtagaggtggaagagaataggggtggatttctgacctgcttggaaagcgaaattggctgggcttgtttgttgcttggtttgctcaccacaagaataacgttggcttggactagggcttggagttacagatttagcctgttgaagagaagggtaggggctgttgtgagatgactcccctacttcaagaactaggaaatcagaaataagaccatcttctgcaagtcatcactttagccaacacacaatagatcctcacagacatgcacaaagttacgttaaagagaagtgacacaatgggatatttagaaggactgagaagtggaagtagaggtttgtctgcccagaagaaaagacaaaggaatttcagaggccaatgttggccatgtgtgtctgaacacagtgcaaaggggcctggagcttgatccctggacttccagggtatggtttcactggcagtgccatcacctgtttagggcacagcacctgaaagctaatgggctttgaggctcatgagcaaacatggcagctctgcacatgattgtacatttggctaagtccccttgtcccattagtcacctcttgcttctgattcagcagcccaagagctgtacctccaagaaaagactgtagcatgtccagtggatgcaagatttcaatctgagtctcagatttagctggtgtttgtaatcgtacctggcttgtagctgttcatgggagccaatcatatgcatctcttccaatggtgtatcacttggagacattacactgatagcttgaaactggccacggtgggagtatcagtgtgctggggctaccatatcaaagcaccacagaccaggaggcttaaacaacagaatttattgtctcacagttctggaggctaggagttcaaaatccaggtgttggcagggttggtttctcctgaggcctctctccttagattgtacatgttatcttctccctatgtcttcatgcgatcttccttatgagtgtctgtgtcctaatctccttttcttataaggacaccagtcatattggattagggcccaccttaatgaccttattttaacttaaccacctctttaaagatcctatctccatatacagtttcattccaaagtactgaggattaggcctttaacgtatgaattttggggggacacattcagcccatacaatggcagtatttatagcatggaaaccagcaaatgcacaactcagggcttcccacgcccacccgagagctggatgttaaacatttaccaacacaccattgactatagctctcactgccaccccactcatttttttttggtgtatgcatccatttctttgaacttggttattcctcaaagataaacagtttctgagtttctgaactaacaaggctaatactaggcctgtccctggggaaagggatgtctctgtagtgcatcttagccccaacctcaaggcttcctaagacaataacctcttgaaccttctaagggaagcacatcttagaataatagtagcaatttttattgacttcttcctgtggaacagaccctggtctaaacactttgcataaagtagcacatcagtcctcacagtaactctgcaaggtgggtattattattactatatccttttctggatgagaaacttgcctgacaccacacagctgctagatggcagtgaggattccaagcttgcatgttcttgatcatcaggctccctgctttttgaggcccggatgttcccttatttcataccacctcaagtaacaaagtgtgattaactctttccaaagccagatcttggtccttgacagccttggttcccctttctggaaaagaagcacatctttgcaagtacctttgttgctcaaagcttggacggcaggttcgatgatatttctagctacctcgagccccattttccgttccagaaagtggtatcaaaagggcacctttagaactcactctgattgcataagtaccttgaataacacatctgtaatttgtgacatatattctctaagcaaaatatagtgagccatgcttcagggaacacactgtgctgttgtactaattaatttgtcaagttatggctaattataaaatgctttgttgcttattttgatttgtaatgtagcctacattgttttaaccactaatgggaagtggcagagtgtgggggactggagtgttccctccaggctgcagaagccgtgggctggtgtctgggttacctgggtcacaagtgtgtgtttcagtcgatcctcatctgctctgtaaggctggaagtccccgtccactcctttttcaccaagtgggcggtggagagccttcctgcttatcagctggtggacactctcaccgtgctgcagtgagaaggtctcacaaggtggcactgaagccttttgtttctgagcccttcagggacagggaggcaggacagggccacaggagggtatcctggccctctggagaaatcagttctgtacctctggctggtccttcttggggctggaggtgacaggctcgaggtgaacaggggaacggcgatgtggtcacagtgcctgcggctgcgttccaaaacttctcagatggcagcattccttgggaaatctgccagggtgcagggttgggcatttggactgatagcctcaaagctcgattttgtcaggacatttagaaggacttcctttccagggacaaacccacagcaaccagccaagaaaacccatgtgtgacccaaggccagaaatcccaggacagcatctgatggcctcatggagagtctgcccagcccaaggcggactgtcttagagtggtaatgtcccttgtcgtagccacccagtaccagtctgcccagggcttagcaggctaggcctggggtcctacacacctttcccccaactgcattgcatgagttctgtgacttctgtttctctgggcttccttctccatataccaggctgatcacctgccttccctttttcctaactgattgtaatgcatttggcgatgtgccctcacagccctgccttttgaagacacgcccaggtccacttgaggtgggctgcagggggctctcaaaagctttcgcctgagcctcccattccaagtgtttgatggtgccagtgtgctgatatttccccatattttaccacccctattttattctcttaaagcacctgctattttcactgggcctgtgtatctcaccttatatctatttattattatttatagatttatgttccatattatgttatattataaacatatttatttatttactttaatgctcattatctgtctccctcctggactatgctgttttgttcaccaaagcacacctagtgcctagcccagggcctggcaccagtggtcaccaataaaatatttattcaatgtacaaaaagtcctgcattgagaggggactctgggaacccttcatagacctgctctgtgctgccagcctgctttgactctggacacagtggatggtgcttgtgtggccagtgcctcctctgttgggacctgtgagcacatgtctggagctggatcttgcacagcacactctctaccatccatgctttcatagtcaagagggcacttgatgaaattaaaaggctgcaaatttaaaatagacacccttttttggcaacatattattaatcaacctttggaactcaatccttcaggatattgagtcaaataattcagcacgactaaggaagagattagaaagctctacgaataagaataacatctgttagcatggagcttccctttccagagaaatccacccctgaactgttaggtaaagtctcagccccagctatgatgaagggataacaggcctattagaactgattaggtaaaatcaaggccgctagtgagagggtggttatagacactgaccagggagagagatcttgtcccaaagacagcccagtcccaaaaacctcctttccaaatgactgtgctccctggagcctagatcctagatttagtaagtccccagtgattccatgtacctgtatacttatccatccacccaccatccatccatccaaccatctatccatccatccatccatccatccatccatccatccatccatccatccatccaccaatccattgatctatccattcatccatccatccaccaacccattgatctgtccattcattgcatccattcatcagtaggtccatccatccatcatacatctgttcatccaggcacaatctgaggaaaagatagacaaggcccttattttcagaaactctcacacgccaatgaggcaggccaaagaggaaacagatcattgtaattgtaatcacatgataaaatgattacaggggacatcctagatgccaggggagcccagggaaggccccttaccaggaagcaaagcctcaactggttcccgggaagcagtgtggtattgcggaaagaatgtttgctttggaactagtcagaaatggatttgaattcttgctctatcacttacaatctgagtgactatgggcaactgcttggagccttcattttcctcccctctaaaatggagacagctaaacccaccaggcttctggaaagattcagtgaggtgatctctgtgcagggcctgacagaatgcctgccattagcagctggtgggtaaattttggtgtctttccctccatttgccttctttggttacttttgaaaatgaaatacagatcttgtttaaaaatatttatatatttgatattctgcacacacatactcacacacacacatggaatttaacactctcaattcagcattaaatttctccctttttctgggcaactcacaaggacatctgttacctcgatgccattagctacgttagcacatctataagtacctcattaaaaaaatcgaatattaacaacatagcgggagctgtaggctttccatttgattactctgaagggtaagtttacttaaaataagctaatttataattctgaagttgtaaatttgaataacattgtcccctgaagacttttttcaatgaatccaagtgtagacacagaatcctcagtttccataggggcagccccagggtcaatggggatgaggtgacacagggtgacaccctctgattggcatccttctttttccttaactcagggggaatgcagccagcatgtttaacactggagctggttggtgggaattgggcacttgttgctgtggtaggagtggttaccatttccatcttgttaggacccctagtgagccactggttctgtgggtgtgatgggagagagagctgacattcttgctggcctggagccctgtccagcctggaggcccagtggccaactgagagggctccgggtggcccatcttcctgggactatggggaggacacagaggttcctttctgtctggatgttccttggggctgtcttatagtccacacttctgcaggcaagactgctgcccccctgcaagggcttcaggtggtctccctgcagagtttgattgtatttttgaaagtgaagtccacttcttatctcatctacacctaattcccagccttctccaactcttgttttcttcccaccccttggatgacccagagactgaagcatcattcatcctcatgggcttccatgaccagctgttctagctcctctctccctctgaggagcgtaccaagccgggcagcaagtgctcatgggctcttaatagaaatgtttgatgatgataattagatcatgggcaatttgttaccataacatttacttttcacatttttcttggaaattacatctgtctccagctcttctgcttgactcaggacagtgatttcaatttttgcaaagaatgtggcccaaagaggcaattcgttactgaagaaagagcaaaggccacaaagctgggtgggccaggcttctattccagcttctctgtcttctagctgtttgaatcttggaaagcttaagtttctgggcttgaattttcatgtttgcaaaatttcttctccctccctctcacagatatttatttatttatttatttatatttattttttaaattggatcctgatttattctttaaaaacctgatagaaatgacatttttgagataatcagggaaatttgaatactgaatgggtattagctggtatcaaggaggtactctttttttttttttttttttaagtatttattgatcattcttgggtgtttctcggagagggggatttggcagggtcatagggcaatagtggagggaaggtcagcagataaacatgtgaacaagggtctctggttttcctaggcagaggaccctgcggccttccgcagtgtttgtgtccctgggtatttgagattagggagtggtgatgactcttaaggagcatgctgccttgaagcatctgtttaacaaagcacatcttgcaccgcccttaatccatttaaccctgaatggacacagcacatgtttcagagagcaaggggttgggggtaaggttatagattaacagcatcccaaggcagaagaatttttcttagtacagaacaaaatggagtctcccatgtctacttctttctacacagatacagcaacaatctgatttctctttcctttccccacacttcccccccttacactcgacaaaactgccatcgtcatcatggcccgttctcaatgagctgctgggtacacctcccagatggggtggcagctgggcagaggggccccccacctcccagacggggtggccgggcagaggcgccccccacctccaggacagggtggctgccgggcgggggctgcccccccacctccctccctctcacagatatttaatgagcacctattacatgccattcagagagagatggccacaagccagactaagccccctttgtcatggagcctacattgcagtgaagtgggacaggtaacaaccagataaccacatagatataaatatggtgaagatgagtaaggggaaaagatggggtgagggtcatattacagaaaggtggggaggggagagaaggcccctctgacatgggggcatttgagaggcctgaaggtggtgacagagtgaaccaatgggacgtaggggaagaacatttaggcagagggaacagccagtgcaaagactctgagcaggggtgtatttgccatatgcaagaaacacctcagcaacaggtcaggtagggctttgtgggactttgtaaagaaattacaaaagtacaaagaaatgtactttaagatggaagctgttagagagttttgagcagagctgctgtgaagaacagaccatggtgggagaagggaaaggaaggaggcctttgagaacactgtggaagcaacccaggcaagaggtggtaggggctttgatgagggggggcagaggtggaaaacctaaacagtggtcaggttctggatgcattttgcttttttgttatttttgttattttagattcaaagggtacatgtgcagctttgttatgtgggtatatttcatcatgttgaggtttgggcgtctaatgatcctgtcacctaagtagtgaacatagtaccccataggtagtttttcaacccttgaccctcctcctgcccccccttttgaagtccacagtgtttattgttcccatctttatttccatgtgtactcaacatttagttcccccttgcaagtgagaacatgccatatttggttttctgtttttgcatcagtttgcttagaataatggcctccagctgcatccatgttgctgcaaaggatatgattttgtgcttttgtatggctgcacggtattacctagtgtatatgtaccatattttctttatattttggattttttttccatttaggagtggaggtttaataggcagaagaaaagagaaagagaaacagctctctctgtggaaacgaaggtctccaagcggaaaggaccagctggtggcaaatgtgccagattttataggcgggtttgaggaggcagtgtctgatttacatagggctcacagattggtttgatcaggtatgatgtttacatagtgcacgcagaaggcaccatcttgtttgctccttactgtacacgtggctggcaaagagaaggaagatggagccaccatcttgaacatgtctagtccttagttcctgctggcattcacctgtgcaagctcccagcttgcttgtctatgtctgcagcctgactttacaggctgctctttgttagaaaatgatttggagctgcctttcattcaaaaggaaagccttactgaggactcccatacccttactatctgcctaaatgatttcttcttaactcctatatcattccccactctggagtggtaaccctaactgctgttagggagtgttggatgatgactctttctggctacttactgctgaaaaggggcatcatgtgcagaatagcagctagggctcctcctggggttgatctaagggtccctggaagaaggcatgcccatgcatggttctatctgcagcaccatttggagtttgattgctgtcaaccattctgatgggtagtaacactgttttgcctccaccagatgtagctgaaacgttaatatacaagtaacattccttttaggataaatggtattggatttgggtagctagagaaactttattgttaacctttggggaatctttcctgcaattattaatcccttcgtgacttccacagaccatctaagacatgcttaaaccttctgtcttgtcctaaatatccttgttttaaaccaaccgttctctttaggaaaagcatttaccatacaagatcctttcttatataaaatctctttcctttataaccttctttacatagccagggtgtgatatactaccaaaaccaaaaagaagttctagtagactcagtgatagtaaaactttcatgcttcctttttgttggtaactattatcccttctttaaagagaagaattaagcaaaattctacagcaatggaaattctctgtccaatatttcagttagaaggtgctaccatgtatagctctactgcaaatagtagagtaagtatagcaattcctgcaagggtaacatagtagattatttccctctaaaattttacttgccaagatatagaatttccctctgggggtctatgaagttccttggttttattttcccaaacaaagaaacctctgggttatggacaccctactcactttcattacctggcagaatttgcaggttaattgcccagaactagcatattgatccagatttctatgttacccatccctttttgtttttttcaagcttcagaagatcaccactagattcacaagaataagcaaggttagtctaaatataggcaaaaagcttaaaaataattaatgtgactaggatttaatgacaaatgtatgataagctttggagtataatttctctctccagtcctcatttttggtaaaaacaaattatgatgggacatgttgttcatagaataaactttagtcttatacttggcgtgattatttgcataaagtacaagaatgattattaggccttttggattggctttgatggaactctgttccacaaggaatctcagataagacctcttaaaggtgagctcagacatgggttcatattctcaaatacctgtgagttgggtgatcctctcctagattttggatgtattttgaaggcagattgacagaatcttcttagagcttggatgtgagtcttcagagaagagtcaaggacagtgccatcacttttggcctgagttataagaatggtgagaccatttgctacaatgacaaggaggacagaggagtgggttttggggggaagtggaaaccagtgtgtttttggaaatgttaaatttgagaaatccaattagaagcttgaaggaggcagctggatctactatgctggagatgagaggagaggctggagctgcaggtacacctggggactcaccagcacacagacactgtggatagccatagtatagcattagagggatgcttaagggaggagaagggatctggggactggcatcagaagggttgctgtaagggctaagtggggagcataaagcaatcagctttcttgcctcccatccttcagaattcatgggacatttcttacctttagattttacaatttggaagtctactagaagagctgggactttttttttaagtataaatattttgctcatgatgacacaatttttatttagttacaaacctgtcatttgagatgaaaatggccctttcccagagtccctcctaccaggtggcttttcagagagaagggtggatactccagtgccctgggcactggctaagaggtatgctgaggggagccctggctgtcctgagcaagtcatctctggtaaagactgagcatcacatgctccccccttctctaggtttgagcccagctattccatgtgaatctgcacatgaatatttaaagattccaatatctaaagatagttctcatcatttctagagcattccagggcagataacagatacctgttttgttgtaggaagaccagggccagttcacttcggtggactgactcacctgaagtcagacagtaaatcggtccataccagtgaccctggcttctaatcccatggcctgggaccttaattccatagccttgatgagtatataaaattccataaccttcccagaatgaaaggggtagagttgcccccaaacagcatacaaagatggaagctttgattacttgcacagctgctgtagtgcacagtttggtggggcagcacacatatgcagtgggagcaggctagggtggctccttgctcataattatttgtcaaggaagtattgggtggagatgcaggaggcagctttagagccacacacacctggtgggtgaatggcatctcagcgtcttgtgagatgtgtaatttgagaagagtcccctcacatctttgagccgaattttctcatccatacatcacggggtattaactcttacctccaggagtggttagaaggattagtcagatgatgtacataaaggagccagcacacagcctggtacaaacccagtgttcatcaatgtttattctcttgtctatatacagccaatgagaaattcatgatggtaataggtacaggttaatgatgagcagtttctgtaatgactgttgtgataatgtgagtgttgattttatgccaataaatcaattaggaaacctgagctgaggaaacaagatgtctgatgtgtaggcaaaacaaaggcaaacaatgtatgtgactggaagccgtcagctgtggcttttcctgaaggaaacttggtctcaaatggaccttgggagaagcagctgcagactccctaagcaggatatgatgatctgagttcaggaatataacacctgaaaaactggaactaaagctgtctcagccactaaaatcagataagggtttcatagcagcactgttcacaacagccaaaaaatggaagcaattcaaatatttgtcaactgctcaatggataaatagaatgtggcatatccatacaatgaaatagtatttagccgtgagaaggaatgcagttctgacacatgttacagcttggataaaacttgaacacattattctaagtgaaagaaaccaggcaaaaaaggactactatcccatgactgcattaatatgaaatgtccagaacaggcaaatccatggagacagagagcaatgagtggttgcaggggctgcggagaaagaaaaatggagagtgactgctaatggatataagattgtcctttgggggtgataaaaatattccagaactagacacagttgatgtattaaatgctgtggcatcttatactttaaatgattaaaattgtggattttatgtcatgtatattttcccacaattagaaaataatcagatagagaagtctgggattttactccaggagaccctcaagacaggctgctccttctgagtggagctctttgtcctgcctcccatggccccactgtgagccagacttagcccagcatgctttagacaggttgtttctttgtctccacgcagctgtgagagtggtgctctcctactttacaggccaggaacagaggctgagagcatgtcatgcattttctccagtcccaggccagcatgtgctgaactgggattcacaccccacacgtctccacatgagggctggacctgccaccataagcaccagtctctggtcatccagcatagccactgttgtttattgagcatttactatgtgctggctccagggtaggtctgggttgcttctcaccagttaggttcagttctgggtcccctatgctgagtacagtgtctggcaaagagtagaagctgagtgtgtgtttgttaagtacatattaggtttttgtcactgacatagttgacttggttgtagatggcaaactgtatcgaaggaatggctttctctttgacagccagcaccagtggagatttcaacaaaagcgagcctgagtcctagcttctctgaagtaaagctgcttgaaaccctcatcctccgttcctctgaaacttgacagccacagctcatcaagcagttgaaaatcatttatatgttcagaaatggacaattcagtattgtaaattttgaaaattaacaaactgttaaaggatcactgtgcacttgaagttgtggcagaaagcaagcatttctgcgcttgtaagagcaatatgtatgcgtgtgtgtttcagatattactcatcaaatacaagcatatgtttataactctccatctatatgcaaatagtttgtggtgtggcgcttatatcccaaacaaatagtgtgaaacgtatataaattatgcaataatatagatgttgcacatatgttagttggagcgaattatcatcaaaactctgggattggatgggtttgtgttgtgcatgttagcaacacccccttgggccttgagggcagtgccagtgaaggtcttgctgtaggaacaagccagagggtggtgtggccttggaaagtggctgctcccctgccccagggcacagaaggactataccctgaggcacagagcttagaggcaggttcctcagaacagaggtgtgtttttcaattttgcaggctcaaaattcaattttactggagttctaggggagtgattgggccagaggcattattccaggtcccaaaactgggttgattatctattcacagggagaagccccactgtccaggctgaagtctcacactggctgagctgcatgatatccgcttgtatacacagtgcagggcacagatatcaggttctgctccaggttcaaagttcagccctgccacttactatatgtatgacacctgaaggaaacatccaccctctctgagtctgttttcttatttgtaaaccgaggagataatggctcctgttctggggttgtggttggggtagaaaggacagcatttggaaagcacgtggtacatagaatgtgctcccaattggtggaaccccttgattgtgactactatcgtaggaaagctacaagggggaagccaattctaataaggctgcttgtgatcactaggaagtgaggagtcaagtgagtcaagttactcttgttggaatcactcgtattcaaggcctggtctctgcacttgagctgcatagttttgatagcaggacaatgcttcagaaacgagcaaaccaccataaccactacatttacatgcattatattacctagtgctcccaaaaggaagacttggtactgttactattcgtggtctgcagctcagccaggggaagccatgtgtccgggtcacagagctggtgagagggggccaggatttgagtccagcctctgtggactgacttctccatcagggctgctttctcgcaaactattctggccacatggggacatgttgctgcattttgagcctctcttatcacatgattcctgtttaaagcagtttcaaaccatgtgtgtggttgggagactaacattgggactgacactgcaaactcctcaggctagctttcctggaattagcctggtataaagactcctggggcccagatgacatcctaggatgactggcctcatcttatctactctgtggatgttttccctgtttgggtgttttcttggcagataggggtggggatacccacccactgtttccctgggctaggggcaggcagacccttgcatgctggaccagaagtgagtgatggggcaggaaaccactaggggcagggaggagaggctctgcccagccggctaactgtgaggctgctgggaagcagagttgtggacagaagcaagtctgggttgcagccagccagagaggtggggctcagaacaagggaaactaacttttggggggagccctcacctggctcagatctgctcatcttatggagccccggcaccatccacgtcatggtgaggctcctcgcagtgactttgcatggatcactgtgtaccatttagagcgtctcacaagaaaatttagccaagcttattttaggccaattgaagttgtaggcatgctgcctagggaaaaaatagatcttttctcacttgatgtgtgacagatgagagcgacagagaggcccctgcactctatcctacacaccgtgattgctgcctggggaactgggggctggctaccttattatcttgcttcttatcatcacttctgaggtgtttaaatgggtcgtttgcaccagacggctgggtgatagcggaagaagaatgggaaagaggaaataagcaagttattttgcggatgctaaccaggtctggctgtctctgcatactcatttgtaaactggatgatctcatcccggactgcccattccaaccctggtcatggctcatggggcccttgactagggaaatctgacagctcttattccatcctcagcaactggagacataagtggctggccttggttcagaggcactgtagaggagagaatgaagaggaagaagaggaaggcattaatttaacataattaatgagtactcactcatggcctaggcatacagacatggctgtgatgatgattattatttttgtatacttatctgtttatttgctgcagcctaagtgagacatggtgaggcccttgtcatgtgtagtgccgggacaggaagggaacttacttgattcatctgaagggaatagatgcaattgaacttagagaggtaggagaccaatgagatataaggcggagtctgggaggaggcctgggttctttcgtgtgtggctgtgtaaatcatacatgattcagggagcacaagaagtcaggaagaagaatgtgtttggtcagggggaggtggtgagtctggccttgggcatgctgggtgtgtagtgttggtgcggtttatgtgtgcaggtattgtcagcaagcagtgggtaataaagaaatggtgttcaagagaggggtctggacagggacctggagaagcagtgggtgtggagcaggttgctgagagaaggtttagagggaaaactggactgagggactgagccagtggagacgggatgggcaaagacagcaggagttcaagagcaccctttgaaagtgggatcagattagtacttagcttgtggggttgtgagagttcaacgaggtaagggcttacagtgaagcacaggacacagtgagcccgcaggccatattggttgctggtgtggattgcagtgatgactgttattctgccttgattagttttctcagtctttcttgggacatacatttcaccttcggactaggtcagatcttagtgcggaaaggggcagggtctctctactgcatccctccgcagggcctctatttctccaagctgggaacccctgaggacagagtggcaggtggcagcgtgaggagttacagggacctccaagcaccctgggctggggtttggaggctgggagagctgcagtcgctctgcccaggaggcagtgattacaatatcctgtggccccccaacatatgacccttgtttgggtgctggtctctcaagaatcttgcaggtcttaaaaaaggaatttttttaatcttttttttttttttttgagatggagtctcgctctgtcacccaggctggagtgcagtggtgcgatcttggctcactgcaacctccacctcctgggttcaagcaattcttcgacctcagcctccagagtagctgggcttacaggcgcctgccaccatgcctggctaatttttgtatttttagtagagatgaggtttcaccatgttggccaggctggtctcgaactcctgaccttgggtgatctaccctcctcggcctcccaaagtgcttggattacaggtgtgagccactgcacctggccaaaaaaggaatttttgacaccatccattccccagtagattagtggccttgagctagcctctcacagagacctcggggaaaaaaaagagcgtcagaactgccctgtgtttttttttcatcctttaactgactttggggtttggggctaatgacccttatgggcaggaggcagcatggctgaccaggggacctccctggcctcaccctgtggccctgcactgtcctacgcaggagccaccagacacaggtggccattgagggcttaaaatggggccggtgctactgagcacctaaattttaataatatggaattgaaattagtttaaatttaaaaactgacacttgattcaagtattagaaaaaattttaagtatgtttggaacaacttgattatgtgactcttctaaagatacattttataaaatataaaatcagatcaagtatttctgatgaaaatttagcgtttagattaagatatgctgtaaatgtacaatacacactggtttagaagactgtatgaatgtaaagtgtcttattaatagtttttatattgattacatgttgaaatgataatattttagacatattgggctaagtaaaatgtggtattaatcggtttctttttacccttttatagtggatgctagacaattttaaattgaatatgcagcttgcattctacttcttttagatgcggctgctctagacagcccgggacccaggctgcagctcaccctcagctgactaagagctagtaagccctttgcagacacacctgagggtgaagctctccaaatcttctggggagggtctagcgtagcctgtggtctgagaagccgatggctccagggttcacttacagaatatactacgcaggtgaatgggaaaattttgcaggtttaaaccagacatcaacctgaatataaactatggacctggggtgaaaatgatgtgtcagtgtaggctcatcagttgtaacaaacatggtactgaggcatgggatggtaataatgtggagatcatgcatgtgtgggggctgaggggatatagaaatctttgtcttttctgtttagttttgctgtggacctaatactgcttttaaaaatgaagtccttttaaaaaacaaaaagcctcaagcagaagaaaagagtaagaaaaacaattaatgaaacaaacaaacaaaaaccctaaacagacatctcagggtgtcatcaatatctttttctgggggaaagaaatctgttcaattaatccctactcatcaggggcggtgtctgctgatcagatcagatcacagcattgttgagcacattatagtattataataaaaggctcagctggagggaggagacacctgttcgccaaggagtctctcctgagattcttaccagaaaacccagagaagcccagatagggagttaatgccttttaaaaatttgcttggcttccatttgggagattaaggccttaaatcacacctgcaattgcaagtggattcctcccaagctttgatgatggtctttgcattgtagagtggctctcagacacttttatcgtcctcccaggcaggcaggcaggcaggtcaggttgaattaaccacatatgagaatcagaaaagacaaaaacgccttgcaaagtggtctccaagagttctggggggctgctaatattctgttttctcatctctgtgtgttcatttatgaaaattcactagtcttagggtttttgtacttttctatatgtctattataacttcagtaaacatagtttaacaaaaggctccagagtcagctgtcactgtcatcaaacccacaaggaaccaggaagatgctgctcccagaagggcttcccttctccccagggaggccttatcctgtggggcctgcctgtcctgtgggctttggatgctggaggcctgtagtgctggctgacctcagatgatgctttaggattttgcaaatggtagaaatggagctaatgatgaattacaaggcactttccactctccccactccatctgttacttcctctgacctacagtcacctccacactcttgactccattttaataggcaggaaattgaggcttagagaagccaaggtcactgagcaaataagcagtaaaggttggaactcagttcagcctgattcccctgagcccacaggctgtgctggggctgtgcccatatgcacacaagggcccacaggctggagctgcatgggcgagtgtcgactcctgcacatccagcatggatggctcagtcggtcagcgccaggaaccatcctgtcagtcacacagaatctaggcagccggctctgcttctgctcctctcctgtgccaggctccatccttgctcctgcctggcactttgcaaatgtgtgaaggtcccactctgttatctaaaggaaactgatttttccctcacattggaacaagtttgctcataagtggatgtgcactgtctcaccttggccagggcactgccagccctctgaggggagtgtgcagaatgctaaacgtgcttgttgacattacacctgagacatgtttgtgttataaatgggtacaaattgaatttggcttaggtgatatatgacgtctgtcatggttttccccatggtaagtcagttagaggagagctaatttatttcagattgggcattccaagctttcattgtgcctagcatggccatatttccctctgcaatcactaggatgaagctggcaatgtaccagggctgccagtgagctggctgctgccatcagtgtgctcctcgaaccaccctggccctgggtatacatgctgaggatgcctcgtggccttggccaaatagatttttgccttcttttggcccatgaagacctggcttggagccagacctctgtttgaatcctgacctgccactattagctatcacactagctgtgtggctcaaagcaagtcacacaccttctctgaacctcagcttcttaatctgtgaaagacagagatgccaacttccacccagtggagttctgggaggattaaatggacaatctgcaaagggcctagcatgcatgtgaattgcttttcctcaactgtgaattgagaacacagattccacctgtgttcctggctggccagggtgtggttggaatggaggggggtcatgggcaggaaaggggaaatgccccatgccccgaagccctccagtccccaggagccctctccctgatgggggcactatggacatcctgatgagagcaggtggctgaggcattatgcggtttgtagagaggttcccaggggagcaccaccataccaagggggcacatgcctgtgcagagcacagctggggtggagggggcagctgtgtgaggacaagcattgtcagcgctggggatgcgggtgtgcaggggtccataggcccttctgtggtgcagatgccaaactggtctggttgtgtttctgagtgggctttgaggcagctgctaggcctctagttcaagctgcctatctcttttcctctgtacttttataggagagggaaggcttcaccttgatcaaaggcaccatcttgtcctataagaggcactgggtcctgggttgtaagcacagtccagaatccagtgttaggtgtcctgactgtgccttctgatttggagctgcaaactcctcagcccacattgtcagtatcttttggagaaggcccatcatggatggaatttgcatcctctcttgaagttacccaagtgcagaaaaatatttggttgcatcatgagaaaaaagaagacaatattgtatgggtggtgttaaaaccctgagtctgtggtaactgttgaaacacatggcagcctcctgccacacagcctttggtggggcagggagatggagctggaaggcggggctgatcctctcaaccacaggccagagctccccgagcagcaagtctttgtctgtggccccagcattctggctggctgtttagggctggtagtctccagaggcactcacaggaggtttggaagaaacagctctggaaggcgtgggcacctgcagtcacgtgcatgtaacaaagccagctgtttgctcttggcctcggagctgcaatcaagaacctaggacttgttggagtgagagacaggttgtcatgctgtgtgagaacactgcatgtgtaactcgagttcccccagacattttggcatgggctgccgtctgtcttgtagcatttgctacataagcctgtcttatctcccctgacagggttatgggaggccagagagccagtctgctttcctcacacctgctacaggcacttacagaattctgaccaagctgggcaattttggtgtgtttcagggagagctttctgatgccagggtttggttgtggctcatggcatgaaggagctcatcagaagtctgtgtgctcatgaaggagctcatcagaaggctgcggtgcatggcccagggccggatcacccctccactggaacagaggcgagcagactgccctgttggatgtgaactgttgctccatatcgttctctttttcctagagctgtgggacaagtacagcaccttgcagctgggtgtgaagtgcctgggagagtgggtgtgaagtgcctgggagagtctgtgtgaggaggagggacgtggcacaggaaatctgcggtgaggcagctgtagcactgagtctgggcatggtctgttgggctcagagatggggcaagtgcctccacacacgtgagcactaagggataggccaacctcctctctttccctcctttgcaaggcccaggctggacctgcatcctctcccaaatcttccttctctttcctacttggaatccccacacctgcttttctacctgcaacatgctcagaactactaatcattcacaatcatcagggagagctactttgattcacacaaataactcaagggtggaaggacacttgtgttgtcagctggatactgtggccctctggattgaatgtctgccagccatacctgccccttgtcctggagacaccagggccaatacagccaaatgggctatgacattgaaccatgacccagttgtgcctgctcaagggttttggggaaggtggctggagaacccctgcttctgcaaataaggctggagcaacaggcagcctggtgcgtagttctgtctccgcatgctgatggctgcaattctgtagcaaaagtcagcacttactggggtggggtcagtgcttactaaaatataacatgagaccctgtagtccagccttctttgacaattcaaattctgagcacttgctgtgtgcctggtcacactgcccagagaagcagagaaagaagatggagaataaggacaggttatacatgtctcttgatacttacccatgtgcccggaattctattttcagttgttattcccataggtaaaatgagggaattgaaccttggagagatttgagttattgtctcaaacaaatgttttatcacacatagcaagtaagtggttggggtcaaattggaaaccaggaatacttagcagcaggtccaatactttgtgtctgtaacctttgatctctgtagttacatgtgtgtaacttcttcctgggatttcagactatttctgcttcagggcctagcagatgattggcacacaacagcactcagtaaaagttcattgaacgaatgacttaggccatgctagactcaagaccaatgcctcctcttatcagagcaccctcattctgtggatgctgagtgtgagagataatacccctgactctaaagtccagggtccctcaaccatgtggttctggccacccagctgctcaccatttgcggggagatggaataatacacataaaagagggtgctgggtttagaaatgggaggcagagatctgagagagcaattgtggtataagactattttttagagccattgaaaataaaatatcacagaagcaggaaagatgtgaaatggagaaaagaaagactaagttccttcattcattgtatattccactaatatttatggaggactactttgtgctagacgctgttctcggctgctgggggataggagtgaagaagacagaaaaagtctacccaatttagagagaattcatagaaattaactcttactcataactctcacttacatggttacacatgaagaaggcttgcttcacttgattccttagcaaacatttgccgccctacactctagggattcagaaagagagattgctgctactcttataagagatggtgctcttaccatcctggctaacacggtgaaaccccgtctctactaaaaatacaaaaaattagccaggcgtggtggtgggcacctgtagtcccagatacttgggaggctgaggcaggagaatggcaagaacccaggaggcagagcttgcagtgaactgagatcgcgccactgcactccagcctgggcaacagagcgagactctgtttcaaaaaaaaaaaaaaaaaagatggtgctctttggggtcagtctgactatttaactcagcctcttgtttacttcctaccactcttctgagactttggtccctggataactgtcttcctcaccagcccaagtccagacataatgctcggtaacttccctgtctatgtggcaacccctcaacacatttccttgacctcctgatttccagtgacccactcctccactgtccctcagcttcctacttccacagccccatcatggtccttagcatcatctgaaatgactccagctcctgctttctggccacatctgtaataatatctgtaataatttcccctgcctcaccttctgtactgtcaggttcagattgcaacgatgaagtccgctcccactaacttaatcagctaaaatgacggattgttaagacactaggcaggtcacagagtcaatgggaagtccagagaacaagattaagaaaatgagcagcaaccaagggagtctgggccccagagcagttggatcccctcagccacagtagggctgagcagtagggctgttgctgaacgtggctgccacttccactcgccctgccacttcctccacagctggacattggcttgcactagcatggtgtcaatattctcttagagtgcttgcatttttgtatcagttttcatcatatttagaaagttgggtaagattatcctgtttccaccttttgccatagctgccagagcattgggagagaaaatatctaaccccattaagcatctttggtaggaggaatgagctttctaagaagactaaagctgtggttgagtttctaaccaactgaaagggagtttggtggctggaaagccaaaggaaagccaaatgttcacgacattattcctttttggctgactgacacccgtgtgcgtttcttcaacccatatttttgagcacctgctatggaactggcacagttctaggggctgaggcagtgaaccaaatataaaattctctgctcagatgagactttgaggagatggacaataaacaggatgaataggtatatggtatgttatgataagtgccacacaacattacaggaaaaggagctgtaacatgttgagagggactcaatgttaaatatggtggtaagaggaagcttactgggaagtgggcatttgagcgaaaactttataaaaggtgaagaaacaaagtatctgaataactcaagaaagggtgctcctggcagagaggacagtaaacataaagaccttaagtgagggcttgagtagatgtgggggcttacatggaaatggggctcgaatagaatgtcctccaatcagataagaggccagcgtggccagagtcacatgaaccagaaggagagtagtaggagatgaagtcagagggaatagtgcccagcctgaaaacttgctccttttaagtctatgacattctggctagaaagtgagccattgactgagtgtaattgtagtgctatggcagtgcgcttctggatggcatctacatacttgccgagtgatctttgtggtatgcctaaatctgcttttcccatccatgctaaaggcagtcctgatgtgggctgagagagagcctgctgtgtggccagaatgtgcaggcaaggagaagccttctggtgactttcttgtggctccagggcctgaacaggcatgaccatgtatatgcccttgtactggatgatggaatgctaatgcatatccttaactttttgactcacttagtgaatctgaaaacatccagtctatgttgggtggctcagcctatgcattaatatggtttccatttagtatggtttccattattaggcatttcttctttcctaagtctgttagaaagtcaggaacggcccaatatgaaaaatgagaatagcttcttgccaagtagggcataacttggctcccaagccctataaatgtctggcatgtttaacttgtgtgagttccatacagcatcctcactcagtggagtcatgttaaatcctgacttgtgggagctgagtgtcagagcctctgtcctgtagcctggaaaaagtagagagcttaccctttatctgggccccattaaaagttgtcagaatttcaacttctccagtgagtggatcagagcagcacacccaaatatggcatctgttgcttccaaatccagaaaggctcacctagtgttgtgcctctttgtgaataacatgggatgcaggggacagcatcttgttttttcttctgcagagtacattctgacaaaccatacagcactgagcttccacaaaacttaactaagttttgcaggttcatacaagttattttctaccatatatacacgtatcttatcaaggcacttcatacctgctaacttatgccctctatgtctgtcttatcagcatgatgtcatcaatgttttagactagcatgatgttcttctcttaactggtcagacggtcaaattcttatggactgtgtagctcagagacagaaagttgctatggacctcaggaaggatagtgaaggtttattgctatagctatctggagaaagtaaactgcttctagtaatttttgttgttgtttgagataaagggaaaaacatactgacaggtcaataaccatgtacaagttgctagggtctgtattgatttgatccagtaagagaccatatcagaaacagcagatgcaattggagtcaccacttgattaagtttatgatgatccactgtcaatctatataactcattactttttgtatctgccaacttagaaagttaatatagggatgtgagtggaatcctctgctttgtacctttcaaatagttaatgaggaagcaaatttatctgatttctctagggatgtagtcatgtttttttgttgttattttggtaggaagagggaaatagtttacattttgcccttttggccttattagccctcacttgattttcagggagagtcaatcgggaagtttatcttactgctgaagatatctattccaaacagacactcgggaaattggaaaacagctattgaataggtctgaggtcccactggactgactagggttgaaactctatttttcatttgacctgcattagcccctactctgacccatgggtagatccagatgtccaggaattaggattagtcaagatccagcattcaatgataccccaaagatcgtggtattatttcctttccttcagtgcaaagggttatcctgataaatagtgtcttagatcattcaggctgctataacaaaataccataaatgatttcgcttataaacaatagtaatttatttctcacagttctggagactgaagtccaagatcaaggtcccagcagattcagcgtctgctgagggcctacttcttggttcatagaaggcattttgtcatggagttgtcacatggcagaaggggtaaaaaagctctcaggagcctcttttaaaagagccccagtcctattctagcacttcatgatccagttacctcccaaaggctccatctcttaataccatcgccctggaggttaggattgcaacacctgaattttgggggggacacaaacactcagcccacagcaaatagtttcaggtccctttagggaaagctaagaagtattaagtattcatgatacttaattgtgatgctttatgtgagttgaggtcttcctgccttgtaaaaggttcagggtcagggtcaattaacctctgccagctctctccatgggttagaacattctgacgacccctctggctctgccgattccctaggtgctaggtacactttactcctggtgtttgtgtgggtgctctgcccatctctgttgaaatcagggcactagtttcaactgcagttgaccaacactttacagcctgtggagaccaggcactaacatgtttttccaaaatgctagcactcccctcatctttgtatttatcaacacttgccgaagggagtggcttttgggaatgtggttataggtgagtagggtgaggtacatctactttatttatttatttattttttgaggcagagtccctctctgttgcccaggctggtgtgcagtggttcaagcaattctcttgcctcagcctcttaagtagctgggattacaggtgcccaccaccacgcctggctaatttttgtatttttagtagagactgggtttcaccatgttggccaggctggtcttgagctcctgacctcaagcaatctgctcgcttcggcctcccaaagtgctgtgattataggcgtaagccctcatgcccggccgacatacatcaactttaatatttttttggtctttggactgtttcctctacattatgtcagagaagtttggcatctcaacttcatttagagttcatcactgttgagtttatatttctgttaaatagctgagcaaacaattagaaccactctcagctgcttgtactaggacattgaatttagaattctggcaagtgcttccatatcagtgaatttagtctgatctgaaattacgttctttcctccttggaatagtcttctcagagtccagtcctttatgttcagttcatacatcgagcctcagatttagagatctgagacttttttttcctctttccttcatttatacagagcacttaaaagctgccatcctaatccatgccattgtcattaatctcttcatgcttttcataatattctttgggagtcgagcattactgtcccaaaattttgcttttaattcattttattcactaaacaaatatttaatgagcatttattatttgctaggtattgttccaggtgttaggtatagcagatgaaaaaaaatgacaaaaatctctgctttcatggagttcccaatctagtagaaagtttatttcagatgatcacatgtgctaatttagtgagttatttcgtcactgcaaaaatattggcttccagctcctcatttctgaatccaaattagattttcattatctttgccctcaatgagattagaatatcagccccagatttctctccttacttcttattgcaatcggctattaagtaatcctcacattttcattttgaccatctctattcttcatccagtgtgagtttttttcaaaatgcaaaatgtgaaagtcatctcctgcacctaccctgtcctttaaagatccctatcccaaactcctttaaaggtttctatagaatttagggcaaagactggaatcttgatagccttcatgattcatctgccgcctaattttgcgcatatttcttctgccttatttttttctacacaaacacatacacacacgccttcacaccttcaactcattacttttttttttttttttggagacatagtctctgttgcccaggctggagtacagtggcaagatctcagctctctgcaacctcttcctcccaggttcaagcaactctcctgcctcagcctctcgagtagctgggactacaggtgcacaccaccacacctggctaatttttttgtattttagtagagatggagtttcatcattgcccaggcctgtctccaactcctgagctcaggcaatccattctcctcggcctcccaaagtgctaggattataggaatgaaccaccatacccggcctcattacttccttttcatattcagaaatcaatttaaactttactttctggaatcccagtcccactcctgccaacatggtctggtccctgggcaccctgcctgcccttcatagccctcgctttgatttgtaatcaaacatacagtattatggccatctggtgaagcagttttcccttcctatgaagtaggccccaagaaaatgggcatgtgtttgtgttcgctgctatagccccaatgctcagcacactgtctagtatgaagtagtattcaatggatatttgtctaatgaattaataacatcatgatagccattgtaatgtttgctcattctctaagtgccaaaataggagtatatactaaaactgttgtcaattgcataagaagcccttcaaggattccaagggcagtcaaggatggcttcctggaggagaaagagtttgagctgagaagagaactgagtttgtcttttcatgggtgtttgagagttgcctggctatttttgccctggatcctattctgtgtctgatatgcaaacctggatgaggtacctgatggtttaaagtcactgtctggagtcaaggaagtggagaggtctcattttgtaccagtcctttggagatcactgagacatgggttttcagcctggtaactttcttgcctatgtatctgctaatgactatgacccatctttttgggttagttctcctttttctccattccggtgtctgatgcagagaatttaggaagtttacagacctctgcttaggttgggttaggaaaattccacataacatgttcatgtccctgattctccaaagttcttgtaggagggtgagaaagcctttgcagggaaagaacataaacagtgttgggaaaactgaaatctaatagcagctttttctgctgttcctgctataattaccttccttcttggcaatgactttacctcttctatcactgctgtttcatttgtccaataaactcccgattatccatcttcaacagcgtggcctggctttatctcaggcaattggttccagcagatggattgattagaagccatttccttcccaaattctgttgcttgatgttcctgttaacttttatcatcagggctgtagaatcctctcctagctgcctgaattcatgcataaataaaactggttgcagctaaacccccagcctctgccatttaaatcccaatttatctcactgtgggttgcttgggtagaaatttcgtttgtggtattgagttgagaaatgtcaagaggggcttgctgttaaaaaaaaattcttctgcaacaaacacttacgcttcttgcaaggatgagatcacagcatttgtctgaccagggaaatgggtgtcctttcaaaaaaaattgtccactttttttttcggttataagttggacctcagaattggattattcataatccttggtttgtgacacaatctcatcattgctgtgtgtggccagagctcattagcattttgaatgctatataatattacaataggacgctgttgtgaatggtgtctcctttgtaatccattctcctgttgataggcattagacatgatatcaagattttgctattgtgaactgtgttattatgaacatttttgtgctgcttcctgctgtacatgtgcaagagtttctcttggagtggcgctggattgctggggacatgaatatttaaattaaaccaaaaaactcccaaattgattgtatcaatttattcttctaccagcaaaatatgggagatgttcttgatttacatactctgaaacacatggaggtttcttaatctgtgtccataaaatgtgtataaaatggcattttattgtgttctggatttgcatttctctgatcaccaaggagactaaagaacttagttttatttttcacaggtgtttccttttctgtgagaagaccatttgtgtctttgctcatttttctgttgggtagaagatccttttcttattgatttatagaagctctttatatattattcataaattcatggtcaattataagtgttacaactattatttttccatttgtcttttttacttccttgaagcttttcattgataaacacaagttattaatttggatattgtaaaatttatctactatttattctatacagtttttttttggtttgtttaagaaatcctggggcttgatactgggttggtggtctttgtccagaaatattaagggatgaagagggctataaccctccttctgagggtttccaggaggagtctgagggtctagcttttctggtgaacccagttcctgttcctgccttctttcctaaggccctgctcactctggcttccaccacagtgccaagcccctctggtctccaggggagggattgctctgttacatagcaggatcaggggtaatcaggccaacaggggagatggtggcaatttttcttttttaatctgtatttatatacagtcttatttctttaagcccatacactgtctcttaccccatcttcctctcaggtgacaatatcagtgagtgccatacagaattctgtattcaccagcatcatgaaacgtttgtggtcttttgagttgatcttggcagagtaaagggacatgtcctggagccattcttgaatctctctccccttctttgtgacaactccccctaaccaaaaataaataaataaataaataaataaataaataaaaaaacacaaaaaacaaaaaaaacaaaactgaggcacttcacttagaaactggggtcctgcttataatcatgcatataacctttactttgatggatctggccagaggggtgttggaccccagccctcccacataccagacaagctcttaggggagcagaagaaaagcaggaagaatttaaatatttaatttttttaattgacttttctagttattaaaagttgcttgtttcagcagtgatattgtataaagaacatcttgtaagatactcctgacatctcgctttggcacatgtgcagtacagtttctatgataatgtgtttgctctaacttccctggcttctccctcagcccatccattctcctgcagagcagttgggttggaggctcattgaggcaagcagcaatattggaggtgggggggtgcggagcggtgctgcgaccactgcctcccatgacccttctgacctcagacttggaactcaagaacctgaggattccagcggtcagtgtcagtggggggtgggaggagagagcagcagagaagctctgagagccccttcccacaacaaatctagttctagttgttatatttaggcaaaactttgtagtcttctttcccttttatgatggattttgataaaatacaaaacagcgtttaattttcttatcacctttgaatttggaaattttgagcacacaagctcttctgtacctatttaaattaaagtccaccaaggggactgcagctcctagaacatgagaatcaagcctctcaatattaaactgcggagtgtgacccctgcttcccccatcctcccgcccaaggacgacggggattgctccagagctgctgggtagtttaccatcccttctataggcatggagttggcactgacatcacagcttcataaccccaccaccgccagcttcccctgcctcctacatccagtctgttcttgttcatagtgagaatcctgtgttcccacttcagtgacacccgaattgttttttttttttttaattgtcttcaaggaggaagggccccattaaagggtgaacttgtaataaattggaatttcaaataaacctcatgtacttgtgttcataaagaaaaaaaaaatccttttctacccctagatcagaaagatattcacctatgtaaaagtcctaaagttagcttctgtcatttaagtgcttttttttttttagacggcgtctcgctctgtcgccaggctggagtgcagtggcgcaatctcagctcactgcaacctccgcctcccgggttcaagcgattctcccacctcagcctgctgagtagctgggactagaggtgcccgccaccacgctcagctaattttgtacttttagtagagacggggtttcaccatgttgaccagaatggtctcgatctcttgacctcatgatccgctcacctcggcctcccaaagtgctgggattataggcatgagccaccatgcccagccctgtcatttaagttcttaatacaactacagctaatttttgtgtttggaatgagttaggttttgaaattaaccttttttcccaagtggataatcatattttcttatcctatttattgaatagtcctcatctgtctgatgacctgacctgccactttggacatctagaacctttttacttatgaataatatctgttttaggactttgtattctattctgcactagtactaccattgcttaattgctatagattcataataatttttgatatttgataaaacaaacctcttcactcttccttctcagaagtgtactggctattcttccatgtaaattttagaattagcttattagggttcatgaaaattctgtcagaatcttgaatagaattgcattaaatatacagataagtatgggaagaatttatgtctacataagattatatatccttatccacaagtatgttatatatcttcatttatttaagtgtttcagagaccagatagggcctgtgtttcaatagttctcttgcctgctgtcaggcaaatctttgtcacttacccttccatatcatactgtgagctatcccccaaaacattatacattcttgtatcttgtctgaattctatgtctgctcttactcaagataatggcgatggttgtctgacatcaaggagtctggatatgtgctttggagctatcactatgacccccaccaaaatttgaccacagtgtgggatcccttatctcatcctggtggttaatttatcagtgatttttatgagtgcttgctttcattttttggtagttcaggtatcctgtgctttgttattagatattctagtttcacacccttgttcccctgctacctaatctacatgattaaccagtagtctctccaacaacatttacccttgctcatgatctttctccttactctcttaggggtagccttttatgagagggcaaagagttttgcctttttttttttcaatttattttacaagtacttattgaatggagctggctattgggaagcattacaaatgtatgccctgggggagggggtatcacacagtataagatgggagccatcgtggttggctggctggaactgtgggtcaatcatagagtcttctgcaggagaactgttcctttcagtgatcctagtaccaaaactgaccagctgtcaggattcatggcatctgtccacttgtgtttgattgctagcagagctgaggcatgcccaccatccaggtccttgccatatactttgggagaaaagatatagaatttgagcctgaaaatatttcattgcttgcctgatgtgacgttggtaagttattcagctcctctaagcctcagtcttactccttataaaatggaatcaatgatagcttcctcagagtgtgatgttacagtagtttatgtcttctttgtccttcttgtctcaagattccagaaaggagaaagtaggaacagtgcaatgaggtcatttttcatctgtccatcagctgctgcaatactgggcaagcgctggagggaggggatgctagggttctccagagaaacagaatcaagtctgtgtgtgtttgtgtgtgtgtgtgtgtgagtgtgtgtgtgtagaaagagagagagacagagagagatagagagattttaaggaatcggctcacacaattacagagactgaaatctgcagagtgagccagcaggttggagacccaggagagggccaataatgcagatgaagtttgaaggccatctgctgcaaaattccctcttgttgggagaggccagccttctgttctattcatgccttcaactgattggatgaggcccactcacatcatggagggcaatctgctttactcaaagtcagaggatttaaatataacctcatcccaaaaccatccatctcacagaaacagccagaatgtttgaccaagtatctggacattgtggcccatctaagtttacataaaattaaccattacagagggactttgggaagctctttttggcagcatatctatctcttctttgataattaggacatttttcaaacatgtgtaaacctccaggagaattgcaatattcctccatgtccattctgcacatttctgcagaggcaggattacagaatgagtaagatcacagatgtggggtcaggtggcctgggttgaactctggctctgcctagtacggaacttaggcaagttacttaccctgtctgttcctcagtttccccattgggaaagagggtaaatagtatacctctcttacagggtagcagtgaggattatctgttgattggattcctgtgcacagtttccttcttcctgttgctctgctgcaagacattggggagtttctaatgttttgctgaaatgggcagtgctgtagtgaacagtatcctgttgctttccttgtgccctatgtatgtggcacagggcaggcaagttggcaggtttcttagctattgccaaagggatctccaagttcgttacactttatttttcacatcctggcaaatatttggttgacactgttacactttaaaatctctgcctgtaagatgggtataagtggtgtctccttataatgtgcatttctccatttatagatgtttgaatatcttcttaggtacccattggccattggcttctaaacccttatggaaagagagctgctctcacatttggtgtctgctgatggcagcctcctcgcgtacttgggctgggtgaatatgggaagtactcatgcacacctgggctccacgagtggctgccacatgtcctgctggctgctggtggccttggcagctctcagaagctgcctgagctctcaggagtctggattagttgggcttccctgattagtcactgaagtaatattctaaatggggcacaagtgccagggaattaaaaatacttcttgtttttgaataagaagctgacatgttcttaggacatcagggctatatctggatgaacagctgtcagctgcctcatgggctctcccatccagctgatgtgccaagggctccccgttctcctggctccctgacttcccaagagcaagtctcattagacaaagttcagtgagggcagctgcctcctggctcttcatcatcaactctatccccatggctcaacacgtgcttgacacattgtaggtatgcattttcatttgttaaatgaatgtgtcaagtgtctacagatgcccaggaggttctgggttagtctggttctgggcttcattgggttcaggagacagaagaaagggaagcccttttttgctcttgtgggtttgctgttgacttgtgcaatgaatcaaactagctggaggacagtcatcccttgctctgcaagcggagttagggccaaccctaagatcttgctgtaccttgagaacatttaagacattgaattttcatcagtctttatggctttcttctgtttatctttgtatccccagcacaatacatgaggtgtggacatagtatgtgcacaatgaatatttactgatggaataaacaaaccaatggaggaaggcacaatgattctcattaaccacggttttgaaatgccacttttgtatctgtatattaaaaggcttaattccacagtttttaaaaaatatgtgcgtagttcaacacagtccctttaaacaaaataacacagcaatcactatggctcctttcttttgtaggacatgtggctgagtctggggggttgtaagtggagagacatttgtttatactcctcccaggcccagtaaccactgtaataattttgtgaaaaggctaggaggttaaacaaggattttgctgatacttaggaaatggagaatgtaagtgcaaaaagacattaagttttacgtctgtgagtgctggtttgaaaacttcataaagaggtgcagcctgtattataggaaaacatacaactcaggggcagctctgtttttccaagcaattaaaaaaatgcaattcaggataaagggagaaaggactgaatgccagtgagctttagaatcagttgctattagtacattaagcaaatgaatgccagcattcttgttttacctgtcattgtctattttctatgaaatgtcggtattttaggttgaattgtatcacctcatggatgtgttgaagacttaacccctggtaactgtgaatgtgaccttgtttggcagtagggtctttgtagatgctgtgaggttaaaatgagctcatgagggtgatcctaatccagtatgacttgtgttctcataagaagaggaaaatttgaagacagacatgcacaaagaggaaatgcatgtaatgacacggacacagagagaggtggccatgtgaagagggaggcagagattggagttatactgccacaggacaaggaatgcctggggctactagaagctggaagaggcaaggaaggatccttccctagagactttgaagggagcacggccttgctggcaccttgacttcagacttctagcctccagaactgtgggagaacatgtttcttttttttcaggcatccagtttgtggtcctttgttagagcagccatagcaaactaatacactcgatgcagctgttcagttacaacaatcaagctaattgtcaggcatctcccacaaatgctagggaaactttctggatcattggatgctaaactttgtagcagaatcacagatgcctctgaagccgaatctgcatttgtaacagatgccctttctctgcaaggccaaattccttcaggaaatctttcccaaactctgacaaacaagaaagattgaagaacagcactctaaggagtcaccaagctcagggaaagtggctaaacagtgctccaggctcagaaggaggaatttggacatgaagttaggtgggtcctcaaggtccacctctgccctttcaatgtcttatcaatcttccttctgtatcttctgagagactgagtgagaattgatggggtgttttgtgtggtttgtgtcatttttttttgtttgcttattttgttgctgtttgcagttctctaaattttaacacatataaagattcatggaatcaccacctcaatcaggatacagaacagctccatcaaaaaatttccttatattatccctttacagtgacagcattttcctaccctgagcctctagcaatcactgatttgttctccatcatgatggttttatcattttgagactgtaatatgaatagaagcaagcagtatgtagcctttgagaccagctgcttttactgagaataatgccttttagattcatccacattgatatgtgtatcagtagttcattttttaaaaaattgcagagtagtatttcattggtgtatcatagttggtttctccattcacccgctgaagaacaagtggttgtttctagtttttggtaattatgaagagtgccactaaaagctttttctggtatgaattttttattcttgttgagtaacacccaggagtgggtttgcttagttgtatggtaagtgtgtatttaactttattaaaactatcaaacttttccagaatgacggtccattttgagttagattttgggaaaggtgtgaggcttaatttcaggttcaatttttttgatatatggatttctagttgttcctacactatttgttaagacgctatcctttctccattgaattgcttttgcactgttgttaaaaccaattggctatatttgtgtgggtctatttttggactttttattctattccactgatacatttgtctatcccttcaccaataccatgctgttttgattaccataacttatggtgagtctgaaaattgattagagtgatttcttcaactgatttttcaacagtgtttagctgttctaattcctttgcctttccatatgtatgttggaaatggcttgtccatattatgaaaaatcctctttggattttgttacctatagaccaatttggagaggattggcatccttgctaaactgagttttccagtctgtgaacacaatttgtctttccatttacttatgtctttgatttcctgcatcagtgttttgtacagattctgcatgagttgttagttttataacttttttttccaagctattaggaatagtattgtctttagattttgttttccaattctacattgctagtatatggaaacacaactgagttttgtgtatgatcttgtatcatgccactttgctaaatttcatttttgtttcaagaaattgttttgtaagttaattgaggttttctatatagacattattgttggttgtgaatagggacagttttacttctttctttgcaatctgtacacgctttgatttcttcttcttgccttatggcactggctagggctcccagtaagatggggaataagaatggtgagtgtgaacatctttacctttttttgttcttagtgggggaaagctttaaatctttcactattaagtataatgttagacataggttttagaaatagataccttttatcaagttgaggaagttctcttttagttttggtttgcaaggagtttttattgtgaaagaaagctgcattttgtcatgtgctttttttctgcatccattgatgtaatcaagttggtttttttctttagactattaatatagtgtattatattgcttgatttttaaatattgagttagtcatgcatttcttagataaatccaacatggccatgacatattaatttttcaacatattgctagattcaatttgctaatagttaacattttcttaaaattttttgtatctatgttcatgagggatattcatctgcagttttctgtttttgtactgtccttggttttggtagcagggcaaatctggcctcataaaatgagtggggagtgtacctctctcttctatttctggaagagattatgcagaattggtgctgttacttttttaaacatttggtggaatttttcagtaaaatcatctagtactgaatatttcttttatggaaaacttttaactatgtgttacatttatttaatacttataggagtactcaggttattgagttaatcttgggtaaattttgttgtttgtgtttttctttctttctttcttttttttttttttttgaaatagagtcttgctctgttggccaggctggagtgcagtggcacaatcttggctcactgcaacctctgcctcccaagttcaactgattctcgtgcctcagcctcccaagtagctgggttatagacgtgcaccaccacatccagctagtttttgtatttttagtagagacagggtttcgccatgttggccagactggtctcgaactcccgatctcaggtgatccacccgccttggcctcccaaagcgctgggattacaggcgtgagccactgtgcctggccttatttgtgtttttcaatgagttggtgttctatgtcatctaagctgctaggtttaagtgtacagagttgtttgtagtattcccttcttatcattttaatagctgtggagtctgttgtgatgttttatcttacttttctaaaattggttatttgtgtcttttctttctcttttctttgttaggtttgctagagctttatcaaatttgctgatgttttcaaagaatcagttttggttctgttgattttatctgttgtttttaggtttttaatttctttgatttctgatctttattattttattccatctgcctgttatggagttaataaaatgcttttatttttatagtctcttaagataaaagctaaaagcttaagttaattttttttaaatctttcttttttttagtataagtattttattgctatgcatttccctctaagcactggtttacctgtgtctcacaaattgtgcagtgttgtgttttccatctttatgtaattcaaaatattttctaatttttctttagactttttttcacccatggattatttataagtgtgctttcaagtgttcggatattttcttattatctttcaaataccaaattctaatttaattccattattgtcagaaaacttttatatgattcacttattttacatttgttaggatttgctttatgacacaggatatggacttccttggggaacgtttcgtgggctcttgataaaaaagcatattctgctgttgttgtgtgaagtattctataaatgtcaataagatctagtaggttaatggatttgtttagttcatgtttatctttgataatttttttgtctattaaatctatctattgctgagaaagttttgttggagtctataaaattatgcatttatttgtcattttagttcctccagtgtttgcttcacataacctttatcattagataatatttctctatgcattataatcttctttgctctgatatttcatttgtctgatgttaatttagctactctggcttttatttgattagtgtttccacaatatgtttttccgttcttttatgattaatctacctatatcagtatatttgaagtgagtttcttgtaggcaacatgtaattggtttgcttgtttttttcaaaacatattccatcaatttttgatcgatatgtttagaccatttacatttaatgcatttagtaatttctttagatttacgtcttcctttttcttgttttctgtttcccctctgtttttgtcttttgctattttctgccttcttttgggttattaaaacattttttaccattccttttggttttatgtattgtgatttttactatgtatctttgattatttttataatattgctttggagattacaatatgcatacttacgtttttatagtgtactgagaatcaataatttgccactttaagtgcagtgtagaaatcttgccaccatttagttccctctacgttcatcaaaaccttatccaactatgttataattttttttttttttgagatggagtctcgctctgttgcccaggctgtagtacagtggcgcgatcttggctcactgcaacctccacctcccaggttcaagcagttctctgcctcagcctcccgagtagttgggattacaggtgcccactaccacacccagctaatttttgtatttttagtagagatggggtttcaccatcttggccaggcatctcttgaactcctgactttgtgatcaaccctcttcggcctcccaaagtgctgagattacaggtgtgagccaccattcccagcttatgttatggtttttacttttagctatcacatgttttagagaactcaaaaggagaagaatctattgtatatagactttattattttcaagatttttttctttgtctctagtttttagcagtttaattgtgatttgtctgaacttgggtttctttagttttattctgtttgggtttgcagaacttcttaaatctatagatttttgtctttcaacaaatttgataagttttaagccattatttctcagttttttccttttcttttctttctttctttcttttttttttttttgagatggagtttcgcttttgtcgcccatgctgaagtgcaatagcatgatctcagctcactgcaacctctacctcctgggttcaagcgattctcctgcctcagccttctgagtagctgggattacatgcacccaccatcatgcctggctaatttttatatttttagtagaggcagggtttcaccatgttggcaagactggttgctctgataacacaaatattagatcttttgtttttgtttcataggtccctgatgctctgttcatttttaaaaatatatttctcttgttctgactgaatcattactattgatgtgtcttcaagtttattgattctttcctctgtcatcatcgttcttcattgagcccatccagtgaaattttttttgttgttaaattttagttattgtatacttcagcataacattcctatttggttttttaaaagtttcttgtatttctttgctgggactttttatttttccatttcttttaggagtgttcacaattgcttgttggaacatttttataatagttactttaaagcctttgccagaaaattacatccacgtcatctttgggttgatgtttgctgattatcttttcccatgtgagttgagattttgcttgttcttattctgagcaattttggattttatcttgggaattttgaatattatgactcttggtttcacttacattctgtgaaaggtgttgatatttttgttttagcaggttaagttcaggccacaagctccagcatgttgcctgtgggctgttaccaatgtcagctcaggtttgaaagcatttgccgtgctcttctaatcattctggtgtgtgtgccacccagtggccagtctggaacctaatggtaatctgtcttttatcttttattcacagcttttatatactgattagaatcctatccacgtatgagcagctcaggagtgagcccaggacttcataaaccgcttgttagagttgctttcctgagattttccttctctgtgacgtcctcactcttttcctattctgagggactctttgatggttctccaatcagctgtggctttggagttcttgctctgctgcacacttttgtggctgcatctgcctctagggcaaggggtcaagagtgttagaggataaaagcttggtaaacttacagccagtttggtgttctttgaattcttgttttcttctcctatctgcctgctcatgtttactcatcagactccttgaatagctgccacatgcattctgtccaggttttatgactatgttcaggggagaatcatggtgggtgctcttactccattacacctagtcagtgttccttaatcagacatgcacacctagtcaactggggaacattttccccttgcatagtttttatggagtcatgtgagtgggggtccgaaactcttcctcacccctaaggctggagaccctgaaaactaaggcagagccaacagattgggagcagaggcatccggctgcctgctagttgggaacttcctctctttccaggattctcttaggacacttgctctacccagaaataaaatacaggattgctgataggtggccgtcccatcaaagttccacgactagtgatagattattggaaacgactttgttcctgaataatgcctttaagttgaattgttataagagaagcttctattttctatggctgtagcattattttctataggtgcagggttccacttctgaaaaataacttttaacataaaaatccgcaagtctaacatgaaaataaatggaaagaacataaaactcaactatgtgcctttaaaaacatttatagtaagcatgtgaaggcaaacagtgtctatgaaggttaattttacatttgcagttgtttcagccaggtggaaatgtttaaaaatataagccaaatggcattttgactaaagattctgtcttgcattctcaataaattttatatattaggtgcttttgattgcttcaataacctttaaactgaattcaaaagtagggaattctggtccatagtaggctgtctctgtaaaagcataggccatcttacctactcttttctgacagctggagatgagtttacagccatggtttctggactaccaggcgaccagctgggggaccccagcattctgtccactgccacaactgcgtaatcacgtgctgagtatctaacagctcaccaataagtggcagcatgtgtgtatccatattccaaccaaaatggacctctatttcttcatttcagggcctcccagcatcccttgggtttggccagttttatggttatcactgaagtgggcagctagggttctgtgtggtccccagcatctaattccaggtgtgtgatttaagggcagagatgttgggtgctaggattgagattattggctgttaatgggctggattttaaacaattttaatctcaagttggcctgatgccaggtgagctttgtcctctggaaagcaccctgccttacctctgtccactcacagatgctgacactgtgggatcctcacagcagacccggcaggtcaggctgccatgctgtgggtcactgcacagcatctgtaaacccagatggagggtctgtttcttgagctggaagagctgtttggaggcattgggtcaagcctctttctgggtctggtttgctcatttttctttcctgttgtttggtgtgtttgaaaaatcaaagccgtttgcagctcctggcccaggacatgtttgattagctggttcatcagggaagatggctcagcagggcaggagtccaacaaggttaaaagttgcaatgtccatctccgtggaaggggcacctgctccatatttaaactggttatttgatgggacagctgcctgacagggcttggacatgacttctgtgtcaggctgccatgcaaggaaacatcatctactgaacatcatcagagacggaaaggggtccctggctttgattttgggcgagtctcattactctcctaggcacaattctcctgtctataagatgggtatataatgtaattttactttacagttttgtcattaggataaaataggacaattcatgtaaaagcaattagccataggctcacatgaagtaaaatgctaagtaaatttaaatggtgctcttcatcattttcttctccttcttcttctcttattactagtcatgggccctggctggggtacctagtttctctaaaccttttccttgtgtatagagtaggagcagtagtagctcctttgcagacttgtaggaggattaaatgggacagtaggaggattaaatggtcctaggaccagtgggtttccaacactaattgcttccctgaccccatttgattgatataaatgtccatgcttttaaaatatttgctaatatttacacatacaagtgacccttgcactgtggcttgcctatgtgaggcagtgtcctgggatggcccataccattgatcggagaattagaggcctgctccccactacatatctgccagctcccatcctactgccttgcttaccttggccaaagctgcccctgcacctgcacagattctgcccactgtcctctcccacatccctccccttgtcctctgtacctgctgttctgaggccagcaaataccctggcctcctcctcttctcttaccttacttaccttaactcaaaccggttgtcctctggggatagcctgtcaagttgaaagtcttattcccttcacattccgtgtccctcaggaggtgtcctttttatattatcttctttatctcctgcaaaccatttctttcccttcctgcaccaccctatctttttctagctcttttaaaaacttctaaaattgttattttttagagacagggtcccacttggtcacccaggctggagtgcagtggtgcaatcatagcttactgcagcctcaagctcctgggctcaagcagtcctactgcatcagcctcccaagttgctgagactacaggtgcacgccaccatgccctgctcattattattattattatttttagagacagggtctcactatgttacctaggctggtcttgaactcctgggctcaagcactcttcctgcctcagcttcccaaagcaccagaattacaaacgtgagccactgtgcctggcctctttctagttctttctagcttattctagctcttaccatttgttccccccccacctctcctcatcctcactgccagctctgtcccctctgttatcattccctgaacactctggctcactctttcctcccacctccaatctggctcatgcccagtgacctcctagtgagacctccaaccccacatgttttcacaaaacccttatcttcatgtcttcttagtgaggcttcaagatactgacccataataatctctcccttgcctactcaattttcctgttcccttttctttgtgatattcaccaggcaaaactcccacatgagctaagcctgaccatcctcttttgcatacctgtgcctgagtgctgagtgttgctgtagaaaatgacaaagccagggtgctggtcttccttggtattgctcctcacaaatctccatggcttgcactgtacttccctaaaccccttttccatgctttgtcttctcctttcaacccctcctcctcctccctccttatttagccatcagatgggagccccctcatctcccatctccaaagtcaagcccacctgcacttgcaccagctggctcattgccccatcttgtcacacccagggaagtaagtgttcttgcaacagccacttgccccctgccctgaatccatcccaatttcccctctaggattttgccttttcttttccacatttctcttctgcattactaatctcttcctatccactcctgcattgctgctctgcctagaaacttgttttagaacatttaatctaagaaagcaaccctcccacattttccacatcccctttcagtgattgctctgtttctcctgattttgttttctctccttttgtctgattttccacccgccacaatttgtctactgatttcaccctccttctcctgaaatgacctttgtcagggctaaccatcttcctattttccaattttctgctctttcccctcttccttgccaccttggtgacatttgacacagtgaagcactgcctcctgacacatttgcttctttggtctatgatatcagcatcagcccagagccctcctgacttggcagtttccttcgcaggctcctctttcttgcccaaactcccactgtccacctccccagaggggcagtcccgcacctcttctctgtctcttccctcctttcttggtggtctcatctccaccaatggcttcaagtacttgcacattaatctactccaaatgttagcctctagcccaggcttttcctgtgagccttcgcatccacctggatgtttcacaggcaacttggccttagcatatcccaaaaagaattctctactttgctcctcccctactttgcccacctctcagaatgactctacaggcagctggttgcttgagtccaaaatagaaatcatccgcatctccccctttcccttgtattctacattcaatcagtggatccaccagcatcgtaaggaactagacccagccagaaggaagccagggacctcacctcatccacagacaatcaggcaactctgggcatctctctactcttgcccccttccctcatgggtcagaggagtggaggctccaaggagcagggagggcgcaagaggaatcttggtacaagatcgtgcttcctaccccagaacaaaggttacccatgccttgggggacagtggaggtaagcattaaatggggtaaaatgaacatgaactttttaatgattaaaagtgaccttaaagttatgggtatcattctgggaccagggataatgactgaaggaaaaaaaaagcctttatatttttattctattggtttccgattgtctaacaaactaattataataaatgtgagcacatcacttcctgtttcagacttctcaaaggtgttccattcaacttaaaataaaacccaagctccttttagaggcctccatgcattctactgcccacctctctccacttgcagggtgcccacctctctccacttgcaggggacctctcttccttccttcctcagcactctgagctcttcgagccccatggcctttgcacatgatcttctggtttcctggaaaggttttggctgcttccttgtggtttttcttaagggcacctcggttgaaaggctgtcgtctctcatgatttgttttctatgtttctgtcttagcacctatcacgtatttgttgaattccttgtttcactgcatattgtctcctttaagtgagtcctgtgtgaaggcagatcattcctgccttgatcacacttattccccctgagcctcatacaagctctgcatctgttaggccactgataaatacctgttgagtgtaagaataaaattcatttactggcttactggtgtcacgtgaagggctatttcttctctgctgagcagagatgagtgtattgtgaagctaacgatgcctaagtttcagggccatttgcttgcctgggttccttctaaggcaatgtgatcaacaggtcatgtttttgaataatttgcaaaggtgtcttgtttgttcgaactgttataacaaaaataccatagacttggtggctcatatactacaggaatttagttctcacagtttggagactggtcctagatccaagtgcagacagattcagaatctggtgagggcttgcttcctggttcacaggcggctgtctttttgctgtaatttcacagggctgaaggggcaagggagcaacctggggcttctttttataaggcactcattatgagggatacactctctttaactaatcacctcccaaaggttccatgtcctaataccatcgtcttgggagttaggatttcaacatgtaaattttgcagagatataaactgtcagatcctagcagttagatgaaaatcatgctttcttttcccttcctgtagaacagcggtctccagcctttttggcaccagggacagatttcgtggaagacaatgtttccacggaccagtgggggttgaaggctagtttcaggatgaaactgttccatttcagatcaccaggcactagttagattctcatgagtgcacaacctagatctgtcgcatgcttaattcacaatagggtttgtagtcctgtgagaatcaaatgccgatgctgattgaacagggggcagagctcaggtggtcctgctcactggcctgatgcttaccacctgctgtgtggcccggcttctaactggctatggactggtacctctattgggttcaacaggaaaatgcaggtaccagtccgtggccagtgggtggacccctgctgtggacccctctgtattaatcatgtttttgattccccagattttaggatgctttgacattttggagctttactgaccagggaaagccttcccctcagggcaagctaattcctacagacagcaaatgacccacctgtgacacactttttgcatgccaaacaacctgtccaaagccaatgactccaacaacagcctttgtggaactctcactggccaagccactgttcccctgccctgatcaccccagtgccaggtagcaggcaactctcgatagtccctaacacccagagcctgctagaattattcacaccagccaatcctaaacctgcgtaatccgcctctcctgtttcttccctcacaaaccgcacaaaaagctcttgtccacattttcctcctgctccctgtgacctgactcaccctggggcttccccatgtggccccaaaaggtgtgccctgcctcctctttctagggatctgtgactctgtgaccacaacagacttcttccttcatgggagtcatttctgtgtctgtgtatctcaccatccttgattaaaagaaatcctggggatatgttaaaaatcctcccaagttgtataaacagatagcatcccttggtcaaagtggctttggttgtgaagtccctacagattcctgcgcccatacccacgtgcatctagaggccacaccaccaacctgtggctcagccaccccggggacagaaacccacagccaaggcccgggaacttagtgcttgagctgttcatcccctatgggcaacggtgaccttgagaggatcacactttctctgcttaaagtcattccctagtccccctaggcccaggggtctaggaaggcccaggttggggagcagactttcaggcaagtgtgaaaatgttacttctcttcttgtaaatgattcatttgatcacagagcctctgccagtagttacagagcttctagactgaagtgactgaaaaaagcttccctacatatttacttaattcatccttatatttcattcatgcaacattcactggacttttgccagactctgtgtgaagggtaggggacacaaagtacaatgaagccacctctgcccctgaggatcagacagattaatcaatgattgggtctcagggtgacacctgcaacaatagaggaaaatgcagggtattgggagagtagtggggagtggggtggggtcacttaaatccagcaggaggtggaagtcagaagaggaggcaacacttgagctgagttgtgagggatgagtaggaataagatgaataattggagatggagggggcatgccagatattcatttctattcagcaggtcttttgtttttgagctggaatttaatgtgggtctctgtgttaggtacaggggatttggtggtgacaaacctgatgattacccactttcatggagttttcagctagaggtgaggtaggcattacacaaaaaatggctcagtcacactgaagagtcacaaattatgatgtctatgaagaaaaaggtgaggatgtgaagatgtgaaatggtgttgctgggggaccccattcagatgcaaggtataggaaggcccctgaggaagcactactcaaacttggggcaaaaggtgagaatgtgggaaaagggcactggcatgggaggagcatcctggattctggaaagaaggaagtggaggtgccaaggaccagagggacgaagggatatgttggagtagagcagggtaaggctgcaggggaagtaagggtaggagcaggtaaggcaggtaaggctgtaggggaggtgaggctggggagaggtaaggctggcagggaaaggggtaattaggttggggggaaggtatagctagggggaaggtaaggctgggggcgtgattaggttagggggaaggtaaggcttggggagagataaggctggggggcaggtaaagctggggggtaattaggttggggggaagatatagctagggggaaggtaaggcttggaggaggtaaggctgggagggtgattaggttggctatgggaagaagtgagagtgggaggtgggaggtgagactgggggaggggaggtaaggcctcttgtgagggaggcatctcagccaaggtgaggaccagccggtcgatcctggcagtccaggctgttcaaggtggggaccgtgactcaatccagggtaggctttgaagatacccctgaggctactgggctgggtggctggcaagctggggcaactctgagccctgggcatggagaggctgccctggggtctgctaggtgcccgtggtgtccccttcagccttcagtctggtcctagatggggaggagctggttagggtggggcaggaaagtcctgactcatctgcagcttagactgggatcctcacttaggagtcagtgcctgaggctgggagctgtagtggttgtgatggagctgctgcttctgagagtgctgaatggggccatctgtggaatgaacagagcagaacagactctggttctttataacactccacttgggtttcataagagaaggaagctctatctgtgctgtcctttgcagtatcttcagtatctagaaccattctttggaactagagctctgcaaacacttggtgagtaaatgaatgttgcacctctcttagacataggagcagatgcaggctgagctgaccaggcagccagggcacattttggaagcctggcatctcagtctctttcctcacctctgtgggcctggcacagacttgctcttgcctgctcagaccactcccttctccaatgtggctggcgggagaggcaggttgcagttggggtctggcgatgatgcaggctccttcctgctgctgtatttacctgattgttacgtgatgctcttcccagctggcctcctatcaggcctgtctctgcaactaacacaatttccccggcagaatgcacagacaaatgtctcagacaacaaactggattattattattttcttcctcttggactgactgctccagtgcccatcaagggctctcccagggcatctcatttggaaacattctgggcttgctatttgcaggtagttgcctttaagacaaaagcggtctgagacaacttcattacctttcaggtttttcttggttaaatttgggctgcttcaaatatgggagactgacttaccgtggaattcttagcgtacatttatgcatccacccaatccatccgtaagttacgaacacctgggaggcatgcagaacttccctcctcgttgtgcttagtgctacagaattttattaaacaggatttattgagcaccttgaatgcagtagacattgtgccaggcatttagcctccaacttcttgctttgtctccaccacatccctgtggggtgggtattaatatttttcttctttggaggagtgaattcatgttctgagagatgaaaccacatattccaaatttgtcaggatttgtaccaagagaccaggccttgcatctctaacttgactttggggaaacaacacagccaacagctgagttgttcttttgcctttccctgtgggccaggcagccagatccgggagatccaatggggccatggtctagacatgggacccccaccacccccaggtgttggttgaggtccagtagaaagatggcctgaccagaggggatctcagtggggacatacaggggagacagctgcccaaccaggaggtgactgtgagtgcaggtagcatttcagatgctccttaggcactgagaggccatcctgggaacccagatgtaggttcttgctgcatctggggttccaggatggctagtggctcctacaaggagagcctgccccatgagcttcatgtaccatgcggtaaaccctgcttctggcctctgaaggtgaccgtctagttagattcacaggggctgctcctaatttatcgatcaaattcaggtgtcacctgctagcttacagttgggggagaccgaggtgggcagccacttagtgttgatctttgcatcaggaaatagagttttatggcagaaaatgccctggactttcaatcagagtggcctgggctcaaacatgaatatggctacttgcttagtgacgttgggcaagtcaatgaaccctctccgagtctcagtttcctcacttggcaacttgagatagaaacatctattactattgtgaagattaaatggtgtatgccagtggttctaatttgggtgcaattttgttccccagacaacatttggcaatgtctggagacatttttggttgttacagctggggggttgggatgctactggcatctagtgggtagagcccagagatgctgctaaaaatcctacaatgcagaggtcaaccctccacaacaaggtattattcagcccaaaatgtagtgctaggttgagaaaccctggtgtaaatgagtaagcatcacctagcgcttggcacccaagagagtgttaatcagggctaattgaattaagagtcagagtgttaagagccagaggactctcaacactggggctcctaccaggtgctccagtgccccatggtttgctcctgggactcaaggtgggggctgtgaatgtacctatgtgcttttgtcaggggactaggagtcttgatcagttgcttgtgaaggacactcccttccccttcctgagcctctctgcctgcatccttctggtgtctgaaagagcttctgagggccgttttgctctgatgtttctttccaggtgctgggatatgctgggatttggccaggaccaaggctccttgcacttctattcactagcgtgagtttcctgcccacctctcccagctccaggtcctggacacaggcccattccacctgcctgcaggtgctggggagcagcacagccgtgggagaaggctctcccgcccagacctctcagcacccagggtgctttcttgacataagcagctcatgccttggccccaggtggccaggtggtagatggagactagaatctcccaccctgcctgctggcttggccttgaaggagacccttgggcttaatctggagagagtctagaggaaggagaactgttatgtctctttctcgttccatgttgagtggttccaggtctttactgaggcccccagattgggggctcaggggcacaggacacctattaggagccttgtgagaaagtaagggagatgagcaggcagggatgaagccagggagatgggttggagcctctctctgtggtgcagggagaggtgaggaggctgctgggaggtcatggaggagagatggagaggagggctggattcagattacattcctgaagtccagtcgccagggtggggaggagacaggctgacactcacgtgtccagaggagatggaggagcagggaaggagcaggtatgaggaggacttcagctggccatgatgagggtgagcgtcctgtgggcatgggagagaatgatattgtgaggtgaagcctgaaaagaaagggccttttctttagcaacccccaagctcatgaccccatggtgagtcttggtcctccctcccttgaccagggcttggggagggagagcccctgagcaatggagtgcagccttgaggagcatctggggcctgccttggagactctatgggagctttcttggcctggccagttcctgctcaccatccacagggcctgaggctcattcagctctgataaccctggatgtgacaccctggcccaggagaggatgggcaactgggacttgtgggtggtctcagaaggaagtcccttctgttcaagtctccaggccacatcccctgcctgaacttcagttctctcatctttaagatgtgataatcatttccaccctgttcatcttaaagggaagttgcaaaaattaactaggctaatttccgggattgtgcagcactgtgaactggggagttaccacagggccgggtggagcctgctcaaggctggggtcccgtgcagtgggcagtggacacgtagcataatctcaccagataaatctgcacatgtgcctcactcctttcttcccctctgggccttctgtgagtggctcccccagcttttctggttggactacatcttataccaggtccagggccaaccagcacgtgtgacagagactccatttccttactcatgaactcaacagaggctgtccggtcatcctcacttcagacaaggtggtgggtgggctcaggagcaggctgcccacctgcttccccggcagagacctgtgtccaggccatggctggctctccactcaggcagctttccacactccagtttccagaaatttgtgtgtttctgggccccaaattggctaattggatcaacaatagagggtcttgagaggaaatgccatgtaggtttctaaagtgtttttagggagccataaaagtgccaggttgtcttttttatgcaggtttttacagtcttgatttaagaggttcttgagttttcctgtttttgcctgtgggttgcccttgctgagaaacttgggctgagggagtttctttttcagtgacaatagccacttagggaaaaagttcttcccaaaacatagagatgatagcggatggggaaagaaagtcacttttgctgaggtcctgatatgagtcaggtgctgtgcacagctttttgcatacattatctgttatgctcctactggatacccatgtgatactgggattgctctcactgtatagaggaagacactgaggctcagagatgtcccaacttatcccacatcacagagctgccacgggctgggctcaccatgggtcccctccccacctcctcccctgcaatactcccgcaatactccccattcacccttggttctcacctgatggacaatggccacaggcgtcctcgggatggttgcacttcacccttgaccccttgagtcaattttccatatagcacctggtctaatcctcttaagtataagtcagatcactgttgcttaaaatgcttccagtggcctttgtttcataaaataaaatccaaagtttttttttaatataaaagtatatatttaaggtgtacaacatgatgttttgctatacatacaaatagtgaaatggctactgtatagccaagtaaattaacacattcatcatctcacatagtttacccaattttttttttttttttgtggcaagagcccttttcatcactttcaaggccctcactaaatgaccatttttccatctgtcctggtctccaacttcattccccagactcacctggagccttatttttggttatcaaacatgccaaacaagcgctcacctcagggcctttgcactggctgttccctgtcattggatcactctcactctttgcccagattcccacatggctggtttccttgccttcttggtgctgctgcacaatgctgcctcatcacagaggcctttcctgaccaccctgcctgaagtagcacactcctccttctccctggtccctctcccgcctgacttcatcgtatttgtcatgacttgacattgtttcatatgttaagtgggtggttggcatttgtaacaaaagaggctatgtgtgttttgctgcagctctattctccatgcctgcaacagcatctgacacatagtaggtgcctggagcatctagtgaatgaacgacccactgaactaacacaggaatcaaaggggcagtgggagtggggaaagacggagagcagtggtgaaggaaagggaagctttagacaaagttttcagatgtgtgcatctgagggtaaggacatcagcctgccagagagcccggggcaagaaggcagagcttggatgaacattgatgtacatttgaaggaggccgacattaagtcctttgccaaggttcctagtggctgctgggctcccatcaaaagccaagtaggcattgtagcccttgtgaagttagcatccctggcagccagctgcttccagattcccttctacaaaggctgatgatctgcgaaggcttttccctggagtgactgcagttcgtgtcctttgcctgcatatttcaaggcataaaatagagcaaaaccaaacaggtcttgtcctggcagcttgtgtgtcagactgaaagcttgtgcctgaagaggtgtgggttagacctgctatggcaggaggggcatattcattgctgttggctgctggtggtgcatttcttccagggcctgggtcagagcctggagcctgttggtcagttcccaactctctgtgctcatgggcctctgtcgggctgtgagctaccaaggtgaatccccacatgcaaccttgtcctatggcttcattgggagctagtggcccctccacgctgaggctgtccaagctacggctcacctgggaggaaggcaagagatagctgtcacttcctgggtgcccacagtgaccagcatcaatctagacatttatgtattcataatttcccaaatcctcactgtgaaatgggcttcattgttctcatgtattacagaggaggaaagcagggcacagagaagccatgtgactctcataagttcctgtttctattaagaagcagatgcagggtctgaggagttatcttgaggctccaagtttgggcctcaattcattacaatgcatgtaggagacacatccctgtttctgaccccacttggggacagccagcactctttgctgttttctttattactctcttaccaacccttcaccccagggcctcatatgggaacacgagtgtgttttccatagggaagaaggagcagggaggtttgtctgctggccaggaaacatccggagatgctgcagaaggaggacttggatctgtcccagccccagcttggggaaccagaaatttgcggttgagagctcagcatcaggaatcaaatggcattagctgtgcaaccttggacaagtcatttctgtagacagacagtttctcatctattatatggaaacataagtttccttgtatctaaaactcctactgcaggataaggcatcacagtcccactgtttcttcacttaacaaacactgagcactggccgtatgccaggcactgtcctaggagtaggggcccagaggtgagcaaaacagccctgacactatccaacaggggctgtgggtggcacaggagatgggcatgggggaatcccaccctggggagaagcccatccagctggggtctgacgggtaagagaaattcattgttatcaggtctaggtaagtcccaggtggggaaggaggaaggggagagcgttccaggaaccaatccaatatttggaaggtaatgaggatggaatggctttgctctctcccctgagactaatgaaccgtcattgaaggcttctaagcagtgactgcttttatcaaatttgtgttttggttgaaaagttcattctggctgctgtgtggagcctggatagaaggtaaccattgtgcatgagtgaagatcagctaggaggctactgaaattgttttggcaacagatgaaggtaacttggagtaggccactggatagacccattctttgcctgtcctcctggcctcttcctgagccctgtggaccagtgtctgcctccaccaaggacagcagtgctgcagccttctgttatggactgagttatgtcccatcccaaaaagataagctggaatcctaaccccagtaccacagcatgtgatcttatttggagacagggtctttgcagatgatcaaattaaaatgatgttataagggtggaccctaatccaatatgactatttccttatgaaaaggagacatttgtattcaggacatacacagagggaagatgatgtgaagatacagagagaaatggctatctacaagccaggaaggggggcttggaagcgatccctccttcctggtcctcaggggaaccagccctgctgacaccttaatctcagatttccatcctccagaactgggagataatacatttgtgttgtttgatctagctacctggtctgtgatattttattatggcagccctagcaaatgaacacaccctcatctctttatatagaaaacttggggacctccaagacctcaccactcttgggtcccactggtggagatgcacagatacagggtaggtggtggtcagacctctccagatgatgctgatgggcactggaggccatgggaggggggctggaggacacaggtttcacgcagggctttcctctgtgcactcacaaccttggtcctcagctgtgtgcagccagacctccagaaagctatgtccttggcctttattatgctcacaggccccttttagagccccccaccccaccacatacacacaaagttcagctcttgtcaagggtcctacaagaagaaacaagtcatgcagagtcagagaatggggctgtcacttactggttttgtgaactgggcaagacacttatgctttctgagccccaatttctctgtatataaaatggaaccattgtctctggagggttactgtaagcgttccaggaggatgtgagtaaacagggttgccacatgcagctgagcaggttgcatcctgcacctggatggctgggaggtgagtctggacttcatcagcacactgcttgctgctcagcaggccttcctcactggggcattttcttctaatttgaataagagctcatgcaggcagggaggaccctgtatggcaaatgtctcacagtgtttctagcatgtagtagacattcaagaagtgttagctttttttttttctgttaaagtaattgtccattacacaatttggaggaatctctttcagaatttagggaatgtctgcttcctccttcctggtaatgtgatcagtgtaacaatgtgtttccctttttgctcttactgctgggaaggtcaagtccattaatgcttaggtttgtacaaatgtattcacttttccctggctctaatttattatgccttatttatgttgtaccagttgattaaatatgttctttgtggtaagctacccagtccctttggagaaaatgcttctaagtaaatgcaatatgtttttcggcttgggcaacatatcatctggctgctttaggtcctttggcctggtagatagtcagaggtgaatggaatagccttggcatctgcatggtgttgaccctgaaccccaaggatgtggctttgggggatttaaaaaaatcacaggttaggtagggaagacgctgcatggactggaaaaatgtccactgcgggaccacttgttgatggctttgcatgaacttaagcaagaactataaggataacccaggtatgtgaggatccctggaaagttagtagtatgttttcagagagctggatacattctcaggctcttttggccctctggcccaattgacctcggcactctcatgtgggccctggagtggcgtctgtgatcacagctgccatcatgtccatcattcagggcactagatagaccagacctctgccaggctcctaagcatgttccatcagggcatgattagtgttgggcttggcattgtgcttaaacagcagcttaggatttcattttcactgggtcgggggggaggtcttcaactggctagtgactgccacgtaaggactggctgggtatttctggatgtgaaatagggacttgtgatctaatccagggcagtaaggaagaccagcccactgcgttgtgtctggagagggacagccttgagtgtgagtgcaagggagcactcccaggctctgcaggtgtgcatggagccttgctctaatctaagcctagggggttgattgctcactttatgttgctagaaatgtttcatagctatgaatatgcccttgtttttcatatttttttcttctccagagttcaagctcactgcccatgggctgaattcagatcagaggtgtatttgtgtggctggcatggtattttctacaacatcagagtccctttaggtggggtctgcacccttgagtcaggcaagtctcatctctcctcatgggctcattcctacctgttcccctcacttctcaccactgtattacctgcctgggacagattctgtgctacctccagcatttacactttggccacaataggctttaggatggaaggaaagctttattgagcatctactacatgccagccacttttctaagcgtttttggaactctagtcttcttcagactttgcatcaaccctataaggtagacactaatcacatttatagcagagggggctgaactccaaatcaaatgcatcaggagagtatgtcccaggatttaagcagccctggctcctacacaggtttcatgggcttcacctctcccgtgaagctgggccttgtcagaggtagaagactgtgctggaacccacaggccagtgcttagtccttcctaactgccttccatttggagcaggagaagaaaaaccatctctggtagttgcagacaagttcccattatggttggagtaaacctgcacccatgtgatatattttcctgaggccttagaaacacagcactcctgtcttagcctgtcctgtggggcctttgaagactgtcagtcctgaaggcagaattttgcaaagagcatacacagagggaaacaggtaagcctgttcaggtctgcagccaagagcagcagctgcttctcctcaggttgctgcagggacactggggaactggacgagggctacgtctcctgcatatcatcctggaatgtgagggaccctcctggaggtgcacgcacaggtggatgccacgggggcaaggggccggggagctagatgggtaggtcaggttttctaagacaaggaagcagtggcttgccccataggtgagttcttgcagaagctagaatctgtagccttccttctactcacctgaaggaggtgccatcctctggagagagccagacatgggtctggtgagcaggagctcagcctgccttcactcagtctggaggcatccccactccctgggggcagtgccttaaaatcacttgacttgaggtcatgctagtaattgggatgtattgatggagcaccatccagagttgtgattaactcggatcaaagtgctcagcagaacacagccttgcagatagattaattgctacaggaaatgatcacagtttgatctctggtcattttgttgttatttgaaaacagaacaaaaaaaacaataatcaaattagagaaaataaatgcttcttattaattaaggggaaaaaagagaagagaatagtacaaagatgttcagatcgtaagaaagacaaggcacacatcacggaagtgttggcatctattagacaacacttgcccaccccgtgatgagctggtaaggtgaacagaggcagagggtgcctgagccataggtgagctctcctggggcttcctggtgttctcacagatggcacgctagttctaaatgacagattttggaagaataataaggaaaaaccacataaatatgttaatatttttcatgtagatgaaatatattttataggaaagaaaccactattgtcctttttgggtgcatgaattaagtttttgggaaaggtggcctctgagagagagagcttgaccttgagggtcgattttcttgatcatctgctgggcagtccttgcctcctggagctgagttgaaagagggcaacttggagaccccttgaccataggcctggaccaaaaagagtcagtctccaaaagtttgggttctggggtagcttactatagactggacactgctcattttccgcagggaggccattcagcttttcttgtttgcaaactccagttgatcccaaccacagatgagccatccactagatctcatcaagcatcttatagcttttttattttattttgtttcccgtatggtagaggatccaattaggacaatcgccctcttggccctaaatgtggatggcctggaggagccacttggtgaagtggaagtaagagtagcctcgtgacaggctggcccgactgatggcccttcagttccccacagtcagccaggaaaggctgcgcaagccctgtccaccctgcacctcagcaaggaggatttcaaaaagtcccgagaaatctcagtgtttttgtcaaaataagggaagatggcttttcgggttgtgcagattagaaactgaatgtggggaagtaattatgaatgtccctaatggagacagagaacgtttggatagactaacagagccacatgtagagattttggacaaattcatttgggcaaatgatgagaatgggaatgtctaaggtggcatatttagatttgtatgaggctctggatgaaacccttgtagagaacatggagaaacacagaattttaagcagggcaattaggttgatgtgtaactttaaacacatgtacctagaagttattgattcactgatcaaagtcaatcaaaggaaggctttaggccatgctcatggcccacacctataatcccaacactttgggagtccaaggtgggaggatggcttggggccaggagtttgagaacagcctgggcaacatagtgagaccctgtcactgcaaaaataaaaaattagccaggcatagtggtgcgtgcctgtggtcccagctacttgggaagcattaggtagcgttcaacatgtccatcatccatgaaaagtggtggagcactgactggttgcagaaagtcaagagggtcactatttcattagtgctgcacaacctgccaggtaatataggggagcatatttagcatagtgctctcatatttatttgcttgacagatgaggatcccaaatatctccaatgactggtgcagtgtgtcagagataacaagataaaatctgatgtggaaaaattgaaagtcttccacttagattcaaaaggtcaatggcagcatttggtctataattaaaaacaataatagtacctgacatttcttgtgttcttgctacttatcaggcataatgccaagtggttttcagacattatcccatttagtcctcacacagccccctgagagaggcaggtgataatctctgttttacaaaaaacaaaacaaaacaaaacaaaacaaaacaaacaaaaaacttgaggcttgggctttgtgtgactttccctcggtatttctttcctaaatattgactgatgaatttatttatgtgcacaattgatactggatctggtcatgagcttgctttggccaatggcatgctggcaaaagtgagcatgcaagttctgagcatagactttccgtagaaagcaggcgtccacctacccatctactctgataaagagaatatgccccaggtatacactgccctcacactgagcccaagaatgggacgtgtggagctgggccatccaggtgactccccagtctgcgaatatgagacatacactcttatattgggtgataatgagattttgtggttgtttgccacttagcagcatgactaatatatgttgccagtttgtagctgggctgggattcaaatccacataatctgacttcagaacccatgctctttggctctttaccatatttcattgaaagaaataagagatgaataatcaaggagacttaatatattccctgctgtagtcttttggttaaatacttaaaaagtctattctcaatttataattgtagcctaatcctcatcaaaatttccattcagtgtcttattagatttttacaaaatgattagaaaataaaactggaaaggaaaagctactttatatagaaatagttagaaaatagcaaataatgaagggggccagtattaacagattttagaacatagaagcccatgttaattaaatctgagaaacactggtacaaacagagacttccagcaacgaaagacaaatctgaaagagttccttatacataaaataagagaagataaaggaggaatcaaataccatggagaaaagaaggatttgtaatgaaggatgttggaagaatgtattagttatttggaaaaaaataactacaaatagcaaaaagtaggctacatgatttttcaggtaacactctaaattttaaagtggtaaaaatatttaaaaagtaaatagatccaatgtacaaaaagtaaaaacttctttataaagacaaaaaataaagaaaaaaaagtgaagggaaaattatttgttacaaatatacaaaatgggaatatttaccttgcctcattcaaattaataggcaaattcaaacctggttaacactggacaaaaggtatgaatgaacaagtgacatcggaatgaataaggttcagttcacctgaaaagtcacgtggtgccaccttgctctgtgcctggccctatgttaaataccaagacttcaaaacaaacatagcaaaatgaacatcttcaggaataaccagtgaatttcaaaataaaatgaaatccatgcaatcatcttatatctattatatctattatagatgattaaaagtagtaatgctatcaaggttgtgataaaactggtgactttatacattgctggttgctgtgtcaatgggaaaaaccatttgtaaaacatacctagaatcatcaatgtgttcatttgtttgacccaataatctcacttgttaaaatttatcctaaccttgtaatttaagtgagaaatacataaatatataaggattgtattgtagtgctatcttccatactgaacaattggaaacaacctaaatgttcagtgtagggaatagctaagtacattatggaatagccacgcaatagactattgtgtagccaataaacatgatgattgcaaaggcactgagaaagtatttctgatatgatcatgagtattgaaatagcagaattatacctatgtagtgattaaaagtacataaaaattaaatatataaatatatttaatatatttatataaatatatacatatatttaatatagttatataaatatatacatgactaaggccctggaatctgacgattcatgggatggctggcctgtgggaaattacgctcttcccaattgcctttgatttccattagggttgtttcatttttcagtaaacaagtaaaaataacattagattaaaaaatgtgccaaaggatggaatgagaacaatgagtcctagctgtaccgggggaaaaagagacttaggaatgtgagttgtattcaagctcactatgagccatcaaaattatgggtcagttaaaaaaaaaaaagaaaaatggtcaggaaaaccttgaacgctttttctgagacacaacatgagatccacaggagatgtctggcttctgtcatgcaacataatgtctttgacattttcccatgttgttgtgtctgttaggggttgattctcatttgttaccacgtagacatgtagaattcctttgtaagaatatacggtcatttatttattcttttgttaatggaaatttgggttatttctaatttttggctatgatgaataaagctcttattgttttattcttgttcttgtcttttggtgggcatatgcacccacttatctagggtatatacctagaaatgggattgcaggattataaagtagatgtatgtttagtcttagaagatgctggcaaacattatcccaaaatgattgcaggaattttttcccacctgaactgtatgaaagtttcagatactctacattctcaacaacacttagtgttggtagtctttttaatttcagctattccaaaggcaggagtgagtctcactgtggttttaatttccatttccctgatgactgaagatgttgagcatttttcacattcttaccagccatttggatatcctgttttgtaaaaggcttgttcagaactttctcccactttactttttcaattgggttgttggactttttctttttgatttacaggataatttttaaaactaaaaatgctgaatatgggtctttttgggacatatgtattatgaataccttgtcatttgtatcatctttttcactatctaaatttggtgtcttttggtgagcaacagttattactttttaataaagtatgattgattatttttaaatggttactgccttttgtcttattttaaaaatctatgcctacattaaggcaaggaagctatcttcctatattttgttttagaagcttatttatttttattttaccttttacatttagatctgaagctgaatgactcctggggaaaggttgtcactggggaaccatctaagtgcatctgttttcacttagatttgttatttttattcctaaatttgatttccttttcatactactgtaaatggaattgtttcattaattttatttttattttcatgatagtatatagaaatagagttgatttttacatattgatcttgtatcctgcaaccttgcagaatttatttattagccttgatagttttttgtgtgaatatcttaggactttaaaaaaaataaatgagctgtgtcatctgcaaatatagatagttttacttcttcctccctatttccttctagatgttttaaaatttccttttcttgcctgatttgcatgactagaatctccagtacaatattgagtagaagttgcaaaagtggatatccttgtcttgttccttgtcttaggggaaaaacattgagtctttcatcattcagtatgatgttagctgcagatgtttcatagatgtcctttatcaggttgaaggagttttcttctattcctaattcgttgagtgttgttgttgtttttaatcatgaaaagctttgaattttgtcaaatgctttttctgcatctgtaaagataatcatatgttttttgtcctttattctgttaactatggcatattacattgattggttttcagatgttaaacaaatcctgcattcctaggataaatctcacttgacggtcatgtataattcttgttatatgctgctggatttattttgctagcattttgttgaaattttttgtgccgatattcataaaggttactggtctgtagtcctcttttcttgtggtgtctttgtctgattttagtatcagggtaacagtagcctcttagaatgagtttggaagtgttccctcctattctattttttggaagagtttgtgaaggcatggcattaaatcttctttaaatatttgaaagaattcgccagtgaagacatctgggctttgactttactttgtgggaagttttaaaattaccaattcaatttcttaacttgttataggtatattcaggaattctgtttctttttgagagagtttcagcagtttgtgtctttctagaaatatatctagttcgcttatttagtttgttgtcacacagctatttatttttatttttttaaggtcagtagtgaaatcccctcttttatttctgattctagtaatttgaatcttctataatttttaattgataaatctagttaaattttatcaattttgtcagtcttgaaaaaaatcaactctttgcttattgattttctctattatttttctatgctctatttcatttatttccattccaatctttattatttccttaattttccttattttggtgttagtttgctctttatctttttagtttcttaagggagaaggttaagttactgatttgaggccttctttctctttcaacgtaggtgtttacacccacaaattttcctctaggcactgcttttgtcacatcctataaattttgatattctgtatgtttttctcattaatctcaaagttttaaaaaattttctttgtaatttcttctttgactcattgattattgaggggtttgtggtctaatttccacatattcatgaattttcgaaatttccttctagtatagattttctactttaattctatttaggtcaaataacatactttgtgtgattttaatccttttacttttatcgaggcatgttttagggcatagcacatagtctgtcctatcctggggaaatgttccatgtgtgcatgagaagaattctcctcttgttgaatggagtgttccatagatatctgttaaatctagttggtttatagcatttttcaagctgtttcctgattgaacttctgtctagttgttctaccaattatggaaagtgagatattgtagtctccaactataatattatcattgaattatttatgtccaccttcaatactgtcaatttttgcctcctgtgtttttggggtgctattgttagatgaacataggtttataaaacataccttcctaatagatggacactttatcattataaaatgttccttttgtgttcaatagcacttttgtcttaaagtctattttgtctgctattagtacagccacttcagctgtcttgtggttactgtttgtatggtacatattttcccattgttttactttcaacctattatatctttgaaactaaagtgtgttttttgtagattacatctggttgcatcttttaaaaaattcactctgtcgttctgccttctgattggagtatttaattcatttacatttaatgtaattactgataaagtagattagcaccttccattttgttgtttgttttctacatgtcttatgtgtttgttcctttttccattactgctttattttgcattcaatatatattttctaatgtaacattttaattcccttgtttctttttctgtatatattttttagttatttttgtggtggttgccctgggaattacaattaacatgttaccttaaaacaaactggaacagattaatggtagataattttaaatgttatgcaaaaactttgctttagtgtagctgtttcctcccccttctttatattattgttgctgtcgaaattgcatatttatacatttgaagcctgtcaatacagatttaaaagtgttattacaggcagttgtcttttttttttttttttttttgagacagagtcttgctgtgtcgtccaggctagagtgcagtggcgcgatcccggctcacagccagctccgcctcccgggttcatgccattctcctgcctcagcctcccgagtagctgggactacaggtgcccgccaccaggcccagcaaattttttgtatttttagtagagacggggtttcaccatgttagccaggatggtctcgatctcttgaccttgtgatccacccgcctcggcctcccaaagtgctgggattacaggagtgagccactgcacctggcaggcagttgtcttttgatcaaataggaggacagagttacaaaaatacatttataccttcatttttacttatattgttacctttatcagtgctctttattttgtatgttaattcagattattatctattgtcttttcatttgagactaaaggacttctagtatctcttgtaaagccaatataataacaaattttatccattctcatttatctgtgaatgtcttaatttctccttcatttttgctggctagtttttgccagatataaaattcttgactgacggtcttttacttgcagtactttgaacatgtcatcttactacctctggccaccatggtctctgctgagaagtcagatgacaatcttattcctcatcagtgatgagtcatttctttcttgctactttcaagaatctctggctttggttttatgatgtatttaggcatgagtctccctgagttctccttcttagcattgattgagcttcattcaagaatttcatttagttctttaaaaatataatttctgtctctttattgacattctccatttggtgagatactattgttatactttaatttttttagacacgattttctctagttccttgaaaatatttttaatagctgacttaaagtctttgggtactaatttcaacaactgtcccccatgggacaatttatattgaatgcattttttcctatttttctgaatgtctcatatattttgttgaaaactgaacactttagataatatgatgtggcaactctggaaataagtcccctttatcctgggtttgttgcttttctctctttctttctttctttctttctcttttggtggtgttgctgttgctatatacttgtttagtaactttgatggactagttttgtgatgtctttattacctgtagtgtgtatctgtattagtttgttctcatgctgcaataaagacatacctggaactgagtaatttataaagaaaaaggtttaattgactcacagttccacatggctggggaggcctcacaatcatggcagaaagcaaaggggaagcaagatatatcttacgtggcagcaggtgagagagcttgtgcaggggaactgccatttataaaaccatcagatcttgtgagacttattcactaccatgagaacagtatggggaaaactgctcccagtagtcaattatctccacctgtccctgcccttaaggcatggggattattacaattcaaggtgagatttgggtggggacacagccaaaccatgtcagtatccatttaagtctctgctcagttttcttagtagtcagctaatacttggtggtcatatatttctttctgcttttttttttttgaggtggagtctcactctgtcacccaggctggagtgcagtggcatgatcttggctcactgaaacctctgcctctcgggttcaagtgattctcctgcctcagcctcctgagtagctgggattacaggtacacaccaccatgtccagctaatttttatatttttagtagagctagggttttgccttgttggtcaggctggtctcaaactcctgacctcaggtgatccacccacctcagcctcccaaagtccttggattacaggtgtgagccaccgtatctggccagatatctctttagatgcctttaatcaatataatttttaccctttcctgggggttctgtatgtatgatggggcatgctttagatgctcatgtaggtacttacaactctctgtattctttactttctacttatatatggtctcaaggccagccagaggtaagatattggagctttctgagatctttccaggtgtgtcctaaatatccaggaatagatcagagatttcccaatgtccctatgggcatctttctctctattttccttttaaggttttggccaggctgttgtttttcctaactgttattacagactcaggtatttgtgatgctaaacaattgcttctaattgtttttaacaagtgctctaaggacagggcttttcctacctagtgagctttaagccaggtcaaataatgacaacaccgtgtgcataaggatcttccaggaaacacgtcaaattgtgacaatgccctggagaatggaactttttaagacgctccaaactcagttcccaccccatcttgtagctgcaaggaagatggtcttcttaaccacctgggttgagtgattgctggtttttaaggctactctggagctggggaggaggtggtgggagtagatctagttaaagtaccataaatcctgatgttcttaccaaggattagctgggattttttgaataaacactccttaggttgttatatggctttggttaatttctagggttgtgagaaagtttttttttttattatattttaagttctggggtacatgtgcagaacacgcaggtttgttacataggtatacatgtaccattgtggtttgctgcacccatcaacccatcatctacattaggtatttctcataatgctatccctcccctagcctcccaccccctgacaggccctggtgtgtgatgttcctctccctatgtccatgtgttctcagtgtttaactcccacttatgagtgagaacatgtggtgtttggttttctgttcttgtgttagattgctgagaatgatggtttccagtgtcatccatgtccctgcaaaggacatgaactcatctttttttctggctgcatagtattccacggtgtatatgtgccacattttccttatccaggctatcattgatgggcatttggattggttccaaatctttgctattgtgaacagtgccacaataaacatatgtgtgcatgtgtcttcatagtagaatgatttataattatttgggtatatacccagtaatgggattgctggatcaaatggtatttctagttctagatccttgaggaattgccacactgtcttccacaatggttgaactaatttacactcccaccaacagtgtaaaagcattcattttctccacatcctctccagcacctgttgtttcctgacttttcaatgattgccattctaactggcatgagatggtgtctctttgtgcttttgatttgcatttctctaatgatcagtgatgatgagctttttttcatatgtttgttggctgcataaatgtcttcttttgagaagtgtctattcatatcctttgcccactttttgatggggttgtttttttcttgtaaatttgtttcagctccttgtagattctggatattagccctttgcagatggatagattgcaaaatttttctcccattctgtaggttacatgttcactctgatgatagtttcttttgctgtgcagaagctctttagtttaatgagatcccatttgtcaattttggctttcattgccattgcttttggtattttagacatgaagtctttgcccatgcctatgtcctgaatggtactgcctaggtattcttctagggtttttatggttttaggtctaatatttaagtctttaatccatctggagttaatttttgtaaaaggtgtaaggaagggatccagtttcagcttttggcatatggctagcccgttttctcaacaccatttattaaatagtgaatcctttccccattgcttgtttttgtcaggtttgtcaaagattagatggttgtagatgtgtaacattatttctgaggcctctattctgttccattggtccatatatctgttttggtaccagtaccatgctgttttggttactgtagctttgtggtatagtttgaagtcaggtagcatgatgcctctagctttgttctttttgcttaggattgtcttggctctgtggtctcttttttggttccatatgaaatttattttttcatgttttttcccaattctttgaagaaagtcaatggtagcttgagggggatagcattgagtccataaattactttgggcagtatggccattttcatgatattgattgttcttatccatgagcatggaatgtttttccatttgtttgtgtcctctcttatttccttgagcagtggtctatagtcctccttgaagagatccttcatatcccttttaagttgtattcctaggtattttattgtcttagtagcaattgtgaatgggagttcgctcatgatttggctctctgtttgtctgttattgctgtagggatgcttgtgattttttaattcttttatggaagggcttatttatggaagtccttactctgccatgtataaatcctctttcagttagatatgaggaccttttaagtaatttctgcatgtgctgtgtcaggtgctgctgctagaatgagaaataagatatagggcttgttttcatctcataatgtgaaaaggagagggacaagttgcatacaaaagcaacaaaatgttacacacatagaaggatgaccagggtgaagtaatggctcaaggaatgtagtggctatatctacctttgaggcaaggtgtgaccaggagaatcatggtgaaggagtagtcttatacatatggacatgaaataaccccacggatttgggaagctgctttggaatcaggttgggcgtggtaagagtggaggatggggagatcatcaggggcctggtgtcaggaggttagagtttttttgaaaagctatgagagccttagcagaggtttgagcacaagtctgacttgttcagatggaagtgagcaaaagtcaccctgtccactgtgtggcgagtgcattggagggtaagtgagaaatgggatgggagtcttaggaaagaggactggtttcttaacttggcagagaggtgatggtcaatacctgggagtaaggtagtggcagtggagaaaggaaggaagggttggagtgaagagataattcagtagtagaatccatgggacccgaaacccaatttcatatgaaagaaaggtcagaagaatctttttttttttggctgaaagatgtagcttgttcccatgaagaaagccatgagccttctaagtttcaactgcctccaggaacatgttctggaatccatgatatagttacagcaagggaagtaaataaagaaataacctccagttcaggcatcagcaacacatgtcattcttccagacttccctggctgggttgggcagctcctcttaggctcacacagaacctgcttcttatgcctagcagagcacttagcatattactttaaaattatccatttatgtgcctgtctttccctgtaaaccatgagtggtttaagcataggaaccaagtctcactcagcattgcttccctagcttgtcccagagtcgggattaacaattgtgtattgaattaaggatgggtgtagagggttaggaagaaaggatatctggaagggtagtactgagtggtttcataaatttttaaatttctccccaaacccagtacctcccaaacctgagcagagtgttcagttgtcatagccctgctcagtgctttagacactcagtctccctggggcaagggtggcaccttgatcaagatggtttctcttgagccaccatcttgcattctaggatccccactgggagctgttagtgtgccttgaggccaggttgtgctggacacatctgtgatgatgttttcttccctccctctccatttaggaagctgacatggctccaggcaatgtaacttctctgggcatcattttcaagtggagcttttggacagttctaacgtttgtcaggtgcttgggaggtctatgcagctgagctggggcttttttctgatttttagggactggcagcttcaggttgtctccttaagtagagaagcaaggtggaaattgggaaagaaggctgtaggggaagatcacttccatccagtcaccagatgctaagcaactttgtaggggagagcaatgaacccggggatgctggaaaggaatgccgggaagggaaggagggaagggaagggtggcagacccctgtaggagcccaccagggacccttgcaccatgagcacagtgaaacccagaccagtgaggaggcctgaccaaaggagagcgagtggcccaagccatagacctcaggatccacagaccaccctctgtcctccctccctctgcctttcttccttcattcccttcctccttctttccttccttccttctgctctttttgcttccttattttcttcttttcttccttcctttctttattcttcccttccttccctcctttgttcttttctttcttcttttcttcctttgttctttctccttttccttccctccttccctctctctcttttcttccttccatcctttttgtccttaggaaggaaggcaggaaagagggagggagggaagcctgaaggaagggaaaaaggagaaggaaagaaggaagaagggaagagagggaggaaggaaagatagaaggaggatgggaaggaaggaagaaaggaagaagggagggaaagaagcagggaaggaaaaaaggaaggagagaaggaagctgagaaggaaggagggaaagagagaaaaacagatgaaaggcagaaaaggaaggaatgaaagaaggagggagagaaggtaaaaaggaaggaaggaaagaaggaaggaggaaagggaagaaggaagggaggaaggaagaaaggcagaagggagggaggacagacggtggttggtgggtcctgaggtctttggacacaagccagttgatttcgtttgcctcaggacccaagtggcgggaggcctcctcactggtctgggcttcactgtgcttatgataccagggtccctggtgggctctacaggggatctgctcatagctcccgggctgacagatgcgggagacttgttgggcatagctaatgtgcctggtggtgccagctgtgaagggaggcaggggcaggctcagaggagaacccagtgccgcatgataattgaggcttgtgtttggggagcaatttagtgttttcaaagcactttcatgtacattatttcattctatcctcagagcgatactgtgaatgtgttattatcactctgttctgttcagagtagaaatctgggcttaggatgtactgccattcaacaaggcagggcccacttctgagactcctgagactggccctggagcccttcactccaggcctagacaccacagagagctccttgccagcctccgtgcgactctaccaccgagcctctctctgtgagtcctcagggtgaaggccagggttaatagcagggtctgcagaagcccctcctccctcctgaagccaccagcaacaagcaggaaagttctcaagagatcaaaagaaatgttttccctgagtgaggtcagtgctcacaatggtgcatccatgggtggaatgcagtgctccaattccagcaaggctggtgtggccgtgatagaagtgattaaaccaggctcaatccattgattcattcatttggttgttcgccaacatgtagcggcaattgttaatgcaaggcaggtgagagattcttgcaggtggggtcaaggggagagacatacaggtcagtagggcgaggtccggcccttgagccttggctggtggaaatgtatagtgctctctctaccttagcatggctgtgctgtgtggatatatgctctcatgcccacagcaaatgcagaggggagctcagtgttgaaggctagagaaagcttataaagctttagcaaagagagggctctagacctggccagggaaggcctgctgtactatgatatgatcacaaccttttcctgactctgcatcctgcaggcagcacctgaacacttcgccacctgtctgtgtgggcagagtgatgttaaaactttgccagctttgctagtgaaaatggaagattgtgcaactatttcagaggacagtttgtctgtttcttagaaagctaagcataaaattaccttaggactttgctattctgctcctaaatattgacccagaagaggctgagcgtggtggctcacacctgtaatcccagcacttctggaggttgaggcaggcggatcacttgaggtcaggagtttgagaccagcctggccaaccctgtctctaccaaaaaatggtgaaaccctgtctctaccaaaaaatgcaaaaattagccaggagtggtggcacatgcctgtagtctcagctacttaggaggctgaggcacaagaatcacttgaacccagaaggcggaggttacaatgagccgagattgtgccactgcactccagcctgggtgacagagtgagatcctgtcttaaaaaaaaaaattacccaaaagaaatgaaaaaaatatatccacacaatgacttggacatgaatgtttagcgcagctttaatcgaaaaagcaaaaaactgaaaatgatgcaaatgttcattgacaggtgaatagataaacaaatagtgatgttctcagtaatagaaattagacagtaattaaagaaaacaatctggtgatacacacagtgacaaagatgaatctcaaaaacattatgctgagcaaaagaagccagaccggaaaaagagtaccttatgtatcattttatgtctatgaaaccctggaaaaagtgaatctgatcttgagctacagaaagcagaccagtggttgcctcgggtgggggcgggtgggagactggctggcagtgcacagggaactctcctggatgatggaaatgtgctccatcaggatcagcaggtgggtgcacaggtggatgtccttgccaactcattgccctgaacatctcaaggcagatgctgccaaggcactggtgcaacactctggagaccctgctgcacctcgtcttgttccctttatttgccaggtcacagagagggccaaagtttcccagaggagggttcagtttggccaggacagggcaggagtgtcattgagaagtgttgcatcagtcagggtcctccagagaagcagaatcagtacacatacacatagaagaagagattcattataaggaattggctcaggcacttttggaggctgacaaatcccaagatgtgcagtcaggaaacaggagacccaggagagccagcggtgtcagttccagtctgaaagaggattcagttcaagtttgaaggttggaaaataccaatgccccagctcaacacagtcaggcagacaaagttcccgcttcctcagcttctttttctttttctttctttctttctttctttttttttttttttgagacggagtttcactctcatagctcaggctggagtgcaatgatgtgatcttggctcaccacaacctctggctcctgggttcaagtgattctcctgcctcagcctcctgagtagctgggattacaggcatgtgccatcatgcctggctaactttgtatttttagtagagatggggtttctccatgttggtcaggctgctcttgaacttccgacctcaggtgatctgcctgcctcagcctcccgaagtgctgggattacaggtgtgagccaccacgcctggaccctcagcttctttttgttttattcagatcttcaactgatgggatgaagcccacctacattagtgggggtgatctaccttacttagttactgattcaaatgctaatctcatccagaaacaccctcacagacacacccagattaatattcagccaaatgtctggacaccctgtggcccagtcaaatgctaatctcacccagaaacaccctcacagacacactcagattaatattcagccaaatgtctggacaccctgtggcccagtcaaatagacatataaaattaacaatcacaggtgtcaccaaggggccttgaggtgacagatgggtattgtattgtttagtgtgttcatatgggttcagtgtagcagggcacctgtgggtgaggggcaggtagtttgtgacttacccctggcattcctatctttgaggagattatggtgccatgagagagactgtcatcagtaaaaaagttactcatggaagtaaaattcaaactgcagtaatatttacaaaggagcatgtggggtccaggagaggcccaggttgacctgacccagcaggggtcagaggggtttctagaggttattggccctgggcctgtgaggtttgcctttgttgtccacttgctgggttttgccatcatggccctgagtagctggcacatctcccgactcccttagggggagtttcacgtgttccattcttgctttagttaaaagtagctcaatttggggaaggtccttacttgcagcttgtctcaccttgataggtgacagccaggtttgcagaggctgcctttccatgtcacgttcaccctgaggagccagaccaggcatatagacatccccagcctagctttccattaacctctcctctcccaagcttaggggaagagttacctgggaatgggtggctgctgaccttcagcatgggtgcagggagagcatggcctgcagagcaggcttggagtcttgccgtaccaatcctgtctgggattcagggtgttctagatgggctgcaaccctaccaggtgggctcagggtgtcaagactctcttttctgcattttcaccggggagaatattcatcctttcctccttcctactgctctctgatttcattttggggagttccatcttgcccttatgtgtagtctggggggattatcccatttacagaagccaaaggggccagatgtgccttcttaactgcctaatacaaccggggggaacaccaagacctaacctggccacttaaatgctttctcgtggggctctaaaaatttgaggaccaaagacctggctggaaatcattcatggggtgtgtgaggctggaggatactctggccacaccatttctactctaaagttatttttgtagtttgttctccaaacccctggagctgcctcacatcccagcttcatcctatagctttggcagtgtgatatggtctggctctgtgtccttacccaaatctcatcttgaattgtaatccgaattgtaatccccacgtgttgggggagggacctcgtgggaggtgattagatcatgggggcggttcctccatgctgttctcgtgataatgagtgagttctcaagagatctgttggttttataaggggcttttccctgcttcgctcagcacttctctctcctgccaccatgtgaagaaggatgtgtttgcttccccttccaccatgattgtttcctgaggccttcccagccatgtggaactgtgagtcaattaaacctctttcctttataaattaccctgtcttcatagcaacctgaaaacgaactgatacacagtgattctgtgagttgccagattccttccaacagttccccaactttaattagaatcaatttctgttgcttgcactaaagagcccagtggttcttgctggatccatttcaaattgacgcttcccatgcctactctgttctgcactcctaaatgggagaaagggcattttccattaatctcaatgaggcttttttgattagagtttgcaaagtgctgggatgtgaaggggctttccttgtgctaccactgaatgtttgggtagcttagagtaatcagaccacatgcatgagcccaaaccaggccaagatggtcccttgtggtcaaaaccgcacttaatccccacctgccccatttgaaaagagaaatcctgagcatctattttaaactttttaaagatatgacgtttatgtaactcacctctttgaagttggaaatatcctcataaactttgaaaggaatgagcattggcagcttataagtttccagaagagagtgctggggaggttgggctagcagaagcttgctggaataggaagggttgagaaagggagttggcacagccaattagagattcaagtggtcaaggtgcccaggtgtaaggaacttacacctggagtgcaggacttgcacagcaggtgcaaaccgtttgacaccatggcttacagtctgactcaggaaatgatttgggttaaaattaaaataagaataaatatttggaaaacaagatatgagtataatgagtgctgaaagaaagaggctgcccagtgaggctgcccaggggcttggacattgcatgccctgagtaaccacatcaggactatggccatccactttgagggcctcgaatcaattttgccagggagcctggaggtgactcgagtgggtcaagctcatgagaaattactgtgaatgtcacatcctaatttccttatcaaattgagaaagagaaagggctgaggggagcacaatggccagctcccctctggtggaggctgagctggagaagcctcaggggtcagaaggggaagagtcccactctaggactgtgggcataggtcagctgcactgtccactgtgactgtggcagacaggggcaaagcgtgggcttgtagggagctcaggaaaggtgctgactgactgtctgatgactaaatgaatcatggagaaaggacagcctggagtctccacttgctctgtcgaaagagacctttctgacccattgaaccctgtcagttgctagttgtttcttatcccaggcacagctggaggcctggaagcactttcccttcaacatgccctacatctttgaataggatagtacccctaatgaggctgaattcatgttctcaggtcctgctgtttctgctttgactacagagaccctcctaggtaggggaccgggcagaggccagctggaccctctaccactgattccacccattttactcccagaggaggccattgcgtccaggttcttggcacttccataagttgtctcgcatgctggaggctggctatcctgatgcaggttctgaggggcctcttggtgtctccatatgttgtttaatcatggctacaggttcgccatcttgatgctgaccctaagggctgggactctggagcaagggcagaaaagcttctttgtctcagtttctactgagtgagtaagttcttccctgcaccatccaagggacagggagatggagtctttccttcaggccctggaatctcattcccagaagctgggagtcacccagggggaatccggtggttctcataactccatgctgcacctgctctacccagcattgggaagagtcttagtcaatggcatgttttttgtatttttgtattttttgtatacttgtacctgtagactccaatcctttagacctatttcaaagtatgtactagaaaaggagaaaaaacacaagttcaacaagtgtctgcagtgggtttgacattttatatccatgatctcatttaaatttcacaacaccgtggggaactgaactatggctcggagggattaagtgacttcttctagatcacaagattagtaaatgtttgagttcacactacttcaacacttattagtgtaatttactgccttgatctgtattttgggggtttagcacagttctgccagttcggaaggacctgggaggctgtataaggacaagtattgcctgattttgctattttatgcttatgctagagtacactgcttatgaggaaccatatgatacagtaatgttgtcaaatttagtggcagcttccttacatatatcaagggccatctatctttggcccttttataatgattccttttataataaagaaagtataaaggctttttttggttgcctggagtgctgataaaaggaacattagtatttcctatatttgtgacttaggctttcatgtagacttaatttctgaagatttcctattgctgccagttactctcagtccattaaatagttaggacataggataaagagagacaatgtttagagtaacttggcatgcttgctggatacaataattggaagtcattgatttatagtagaagtgatggtaaacctctttctgttagatttcatatttaattgaacatcctctattgccatcctcctgtcctgagtgctatccaggtactatcttcattaatggcatttcatgatgttgttttctgggaccagaacttcctactggctccccttctttccaccattttatgtttgttaatttcaaggcagtttcagacactcctgtaaattgttaaacagtaatagactcccctcctctcatttgacttgattatgaagtgccaaattccaagttcagaaggatttgttatttggagattattttgccctcttttgtaaattaatttcctttcctgctaagacagccaaagaactgcaatgattttctaccacagagaggtaatgaggcttaggggaaaaagcttaataggaaaacattgtcccacactaagaattaggaactcagggcagagaagaagaagatgaatattaaaaccagacagtgtgatatttctgtgtgagggtttctgtgaaagtgtgcatgaattgttctggggaggaattatgcctgtaccttcatgcacatcagagactacctatacagagagactgtgaaatggttaagcacttaacgcctcataggctgaagcagcagagaggggtttgcaattgagtgtgatgttgggaggccaggaatattatagagtccacagattctgcaaagtggagaaggcttttttagttatacatagtctggaagtttcttctcacaaaatatcctagcaattacagttgacctttgaacaatgttgaagttaggggtgctgactccctacatagtcaaaaatttacatataacttttgttgttcagattatttcatcactcaggtattaagcctagtacccattagttatttttcctgatcctctccctgccctaccttccaccctctaataggccccagtgtgtgttgttcccttctatgtgttctcattatttagctcccacttataagtaagaacatgcagtatttggttttctgttcctgcatcagtttgctaagaataatggcctccagctccacccatgtccctgcaaaggacatgatctcattcttttttatagctgcatagtattccatggtgcatatgtaccaccatggaatactatgcagacatataacttttgacttccctaaaatttaactatgaataggttactgttgataagaaaccttactgataatataaaaaattaacacatactgtgtttgttatacatattatgtattatactcttacaatagagaaaagaaaatgctattgataaaattataagaaaaaaatatagttactattcattaagtggaaataatcatcataaatgtttttacccttgttgtcttcacattgagtagctgaggaagaggaagaagaagaggggctggtcttgctctctaggggtggaagaggcagaagaaaatctgagtgtaaatgaattcatgcagtttaaacccatgtgattaaaggatcaactgtgtacagttctcccaagataatagcctagatcattggtttggagggggggatcataccagagagaacccatgaaatagagatgttgttcaatttgcaaggccctgttttgtttctttttctttattttttctctcttttcctcttgtggcagaaggctttctttggggagtgagccaagccttgaagaaaaaaaaacacaaacacaaaaaatctccttaaaaaatgggtttgttgcagatcccacacttaaacctgaaggcattgcagtaatattgcaattgatatcaaagtgcctgtttcatcacagatgagttgaggagtttgggaaacactgaagaggattaataaaagaataatttctaaaacatggcattgctaattttttcatgtctagcttttcctctggatggatcttaaaagcaaaacaaacaaaaccaggctatttttggttgttctatgaattgttttgaagatttagcctgttctaggagtttgcttcctcatgctgttttcaggttgatgtcgtaacatgtgcccctctttgtttactgaaaattattaactctgttcaattgctctgttgtgtctttattcttgcatttccttcctgtttgtttcttagaggatgccattcccatgtaggcactgtgctataagagacagaaaggagaatcgacataagtcttgtttttgaaaggtttgtttgggaagatggaatgtttagtgcttcggatagtgttccttagaagcagggcctgacatggagatttgtgagcactttatttattgagaaagggagatgctcataaaggagttagggagatgggatggaggatggtatggacctactcaggcaaggcgtcggcctcacccccaggaacacaggtgatgctgaagagtgtcctatgggcttttgttctccagcagcattggccatggggtggcaacagggccctgtgggcacctctgggctttgattactccagggaaggttgtgaacgtgagcctttagccagcacctgcgggccctggggcagggccagcgaaagggatcctggggtgtgtctgggtgggcaccagcaatgtctgctgcagttgtgtacataaattgccttagataaaggtagaaaataagacatgttactagaagtttgagataatgtgcaatgaaacttcataaggcatagagggtggcttgacctgggagcatctgggaagactgcatgggagaaccagcatatgaaatgaacctggagagatttgagctttttgatcatgagtagggaagtgtgttttggttgtatgtgaaagaaaccccaattaaacgtctcccacctatactccaggcccagctaaagctagtataagcagaaatacagaaatataacatgtgagcacacttaatggggaggtctgagggtgcatgcttagaactccctctgcacactggtgctgcttgtccttttatttgctctgattccatcccatcacattcaattattaattcaacaaacatgcatgtactatatgccagacaaaaatcccttgccctcctggagcccagagtctggttctcatggtaggcaggatggtaactgccagccccagcccaaggaagacagtgacctggtttggtcttgcttgagatgtttccatcctgtgggctggtcactgtgaacaagaggatagaaacatccaatgaccggggataggagtgggatctagtgagtggtatctaaccagagccagatggagtcctgcaggggccatttcccaatggaatggggatgccagacaggctcctaactccagacgtctcccacatatactccaggcccagggttcaagtcagatgatggtacagtattactcctggaaggagactcttgaatgatcagtgacagtgctgtcagagcacagggcatttggagaggagtggtgcatatccggctggaacctgatttgagaggactctgaagctgtaccaggactgtagcctttgttctgggagccacagaggatgaaggggcttggtgtgccaagcggggtgtaggaagatcactctggcaggaagtttgtacggggcataatgtttgctggatttgcgaactgattaaaattagaggacaaatcaaaggtgactgcaaggatgtgcttctacttttaaatattttgttatcttacaggccttttgagatgttctccccctctgctccttgacaagaccattgatcacagtctggtcaggcttggattctcagagcctcccttatctgtagctgtatcatttttaaaagtcttaggacatggagttacatcttgcttttctttggacatttcacagtctctttggctagagtctgggatacatttgtgattacactgagctgtaccctctctggctagcacgtgctattaaaatgacaggaccactttctctcaatgttcttgccactccatttccggaaccatgtctctttagctccagaatagcggcatttcctccactgcttctaagttggcaaattgtcactccaggtgcactgctctgggcttaatggctcttcaggcatatactttagttgaatgtaaacctcccattgccactgtgttttgtctgctccctatttccatgaaagtaaaaggaaggaatttaagttcatttaagatcattaatttataaaattcctagccttgatgctaggctttgttacctaccaggtatctctctctctctgttatctatctatttatctatctacccatccatttatcatccagtcacccatctatccatccatctactcacccatccatccaactatccatccatgcatccatccatccatccatccatccatccatccatccatccctatagttctctctctctctttttatatgtatctctcttttctctgtctctctccctatagacacacacacaagaaacacatagatatcaggggaacaactagacatttttgctaattttattttagtcattaatataagtgcatttaatcccggcaatatatctataaagtagacattatctctcagtgattattcactgagtttcagggaggttaaataatgtgttcaaaattatagttagtctttggagatgccaggatggaagcctagaaggtttgatgtaaagattgtgctcatcagagcacaaacaatgtggcagcaccatccataatagcaaaaacctggaaacactgtaaatgaaaatcaataggtgtttggataaataattgaatatttatccataaaaagaaatgcaataccacttcccaaaagaatggattaggtctacatacacaaagagtgagaaaatgttcatgatgtattgttttatgacaaaaagaagcaaattatacaatattatgtacaatatgatttatttctgttaaagttatattcttatatatgcatagaaagggtctggaaggatgcccaaaaatatgcagttaccagtggttacttctgggaaatgagattggggaataaaaaggaattttcaactaaaacttttttgaaaattttgcaattattattattttaataacagttattgttgttataaaaatgtaaaaaccaatacaacaccctggtacaaaaggctatctgctgcccttcccctcccgcaccccacacctgtcagagtaccctcctgggagaagcacgtcttctgttcccatagaaagtgcttcctttgtcctctccacccaaatttaagcatcatgtccagacggtttctctcctctccagtttgtgtattcctgtgtgggcttaaagtgtatttttctgttcatgttcctgattataaagttaatacttaataataaaaacatcaattcagacaacaatgaaatatcgtattacctttcagaatggtcaagatttttggaagcagtttacatatatttattttttccttaaagcacatgtttttattaaaatttgaaaatactgtatatacttagaagcattcagaatgtcaaaaaaacaggatcttttttcttgcaattataagctggtattaagttcatagaagagttaatacaagttgcatcaaaaacaaaactactactccaaatatagtttgtgttatatgtgacctgctttaaatttctgtgtcaatttacagccccatactgtaagatacaaagtcagtgtctattgcaaatacctctaaaagttaggttcataatgttttaatcttaatactaggcttactatacaaaaattatctacacatccttattatttcaatttttaaaaaaccaagtgagatgtgtgtagggcagttaattccttcagagaagagaacatcttctaagttgggaaattgtcactccaggtgacaatgcagcttcccaaaaggactacctaattcctcaactccatcctcaaccacttcatcctcatcttcctcttccttggactagatgttttatccttggcaagtatctctgttttttaaaaataaacttttcacttggaataattttagatgattaaacaatggacagagagttcttatctatccccttactcagtttcccttgatgttgattatctcatctaatcaaatcctacattgccatggtacatttgtcaaaacgaagacactgacaatggtacattactatttaaacccaagactttatttgaatttcactagtttttctactaatgtcccttttctgctctcagttctagtctaagataccacattgcttttaggacaacttctttttctcctatggtaggctttaacctggcaaagcaataccattttcaaaaatttcctcagcttggtaggcttattgtaaggttgcttatcacctgcagtgttattcaacattctcctaattcttttgcaacatatccaagatgctctcctttgatttctggggatagaccgaacaaaataagaacaaggtcgaaggaggctattgagtgtattgggacgtctgaccctctttctttccccttcagaaggaaataaggctttcatagcgtggctttatgcttttgccacttcttcagcatcctctcttctcagcagatttggtggtcttctttacgaagcattttttagaaaattctgtgaagttgactgaagcatcaggtgctgcttcttgtgtgcctttctctggcacagcatcctgcagagtcacgacactctccatggacgtgcacttgtgggtctgtggtgaccacagtgcccctgggacaatgactgggtcttctaggggaatctgtagccatagcttcattcccaaaactggctgccttgctcatacgtgctctacatacatatttttaaattatattttatctgagatacgaaagttatccatggccattataataagaaaaacagttcaaagatgtgtaaagcagtattctccccaccccacaccacctccagtcccaggctccgtgttcacagcttggagtgtatccttgcacagctctgtgtgggtaacaaggtaccaatgcatgtggtgggtacttacctcaaaccacaaattcagaagtggaaacaacacagccttttttgactgcagcggaacttaattttcattttgcacttccccttctgtgtgggggcagagaatgcagccacggccatgctgtgtttcccctgtccccttctcctggaggagcctctctgatttggcagtgagaataatggtgcgggtggacagtgctggtggggactgccctggttcattgtcatcactgtcgcgcctcttctgagccatacactgttccttctggacttgctgttgtctctcttgctgtgtttgccaagtcatccacatttccgcattgtgagccattggagcttatgactgtgtgcttctcatattcacctactattggcctgtccctgactctcaggtcaccaggcagctccacaggccacactggggagtgtgggtggggttctgggaggccccttatgtctaccttcctggatgcctgagaacactgggcttgttggcatcacagtgcaaaatgaaactgaagacaatttctcagagccgcccaagactgacctggggattcttccccccgcaatccccggggctggccttggccctgggagcagggacagcatccctttccaagcccccactggactctgttactcaagtctctcatgtcatctctttttgcctgagcatttttctctcttcatggcatcaaaagtattttcccgaataaattatttagagcagtgatttccaaagtgggttacacaattgattccttggtgtgtcaaagaaaattattagaacttctgtttctaatttttaagtcaaaaagcaaaggagtgaagcttcctaatatttaacacgagttgacacttgggtcgaatggagtggacactgagcagggttcagagcagtgaccttacctggctgcttgtcttctcagggcattgagcacaacctatttaatctgccatgagataccattagctgattactttttaaaacacaagacctttcaatggcagactctttatagtaccttgtaatgaaatggggagaaaattttgaaatcttttgtactacccagagcttcactggtgatcttttggcaaagtgcttaaaagtctgggacttgatgctaagacatttttctctcattaaaaaacaaactttgaggattgctgaccctatttgtaataatgagataatgtcaattgaatgctacctggcagatactcttctaaaaattaaacatattttatctgtcccttcaatgttttaacaattcataagaaagtaattgctttttgaagtaaattcttggttcaagagagcattttgaaaatgaatggtcggaaatatttccagtatttttaattgttgttgctgaaaaccatatgtgtcactcataaataataatttaaagcccttatatctgcttactagaaaacaaaccttggaaacagaattttctaatccgtatataaaaaacttccacagtgaagtatctcaggatgttttgaaagtgcttatgaaaactatgaaaattttatcatcctaaaaacctgggaaacagaattttctagcccatgtgtaggaacttttcagagtgaagggtttcaatgtgctttgaaatgactttctaaaaacatgaaattttagtgtgtttgaagtatctgggaagatggaaatgtattagtcaactttttgacaaattctgtttgctaagattgaggaagcaataccccaaagaacttcttcagtttggacatatggaaatctgacagataccactttcagctacagtacagtacccattaaaatcaagtattgaaataaatggaaactggaagcaggctttgaattactgtattacaaagggttaaaccaagatttaaaaaaaattaaagcattttcaattacattgctggacttaaattgtttataatggagcatatatgtttttaattataccaaaaagattttgtactattaatcacagtaaatcataacttattaaaatcatttatttcttcttttggatcttttcgtattatatattctaatatgttttataatctatagtaattcatgtgcataatttttaaatacctaagtatacacataacggagcacctgcttcaaaggttttgctgataggtgttcatggttaggatgcttggcagtcatagtttggatgaggacctcagcatttgaaactcaaagccatgagttaacctttatttctatagtctgctggggtacccattatttccatgtctttaggagggccactgtataaaagaaattagtaaaatgaaaacatgtcagtattataatattctgcaaaaacgcatataactatatcatcgtttttattttagaaaaaatggaattgtactatatccgttacgttgtaacttacttaaaaaaaaaactctacagtaaatcacattcatctttccaaattagtaaatgtaagtctaatttactcctttagtatttatctagtgacccataatatgcacatgctacattttactaagcattttcctattgagagatatacatgtttgccccaggttttctcttccattcttttctttctcactacctccctccgttcctttctttgatgattcctcctcccccaatacagccaatatgccaataaatatccttatacattttttactgctgtaagataaatttctcaaagtcgaactctagggtcaaaggctatatgtattttcagttttaatagctattgtcacattacttttcagatatgtttgcagcaattttcactcagcaatgactagaaatattatttctttccatccttgctgaactgaaattattatttttcttcatttttgtcaattcgaggggttaaaaataataccatgcttaaatttgctgcttgtgagcttgagcacatttttatttgtttattagctatttttgttcgcttttgctgcataacaaatcaccccaaaccttagtggcctaaagcaacaaccatttattttagctcacaattctgtgggccaccagtttgggctgggctcagccgggaagttctgttactggtcttggcttagctccttcacagatctgtggtcagctactggtcagttaggtggccctgtggttgccagttgggtggctgttggctagggcaatggaggccagtgggccatgtgtgtctcataatccaccaggctagacagagactgttcacaggctactgtggcaggattcctcagagcagcaagataggacaagccccagtgctgagaacttttaaagtctctgctcaggttatgtttgttcatttcccattggccaaaaaagtcacacagccaatccagactccgggcttggggaagtagatatctctcctgatgggagggagaatcgtgtggccattgtttgcgatctatcacattagccttttcaatttctttttctctgcattgcttttgcaatcctttgccccattctcctttattttcttattaatactaaaggagctctttatttactgatattaaccacttgcttggcatgtatagttgacccttgaacagcatgagtttgaactacataggttgacttttcatagaggtgggctctgcagggccagctgtgattttaagtgtgcctggattttggtataggtgggggtagattcaatccccaagtatagcaagggacagtacattgcaaatattttctctaatctttcatttatctttttgctttatggtatttttcactatattaaagatgatctggcttaagaaattcttcctagttccatggtgaggtaatgcttatgtttctggtatttttttccctcccagtatagatattttattatttccatttagagctttaatctgtttggcatatagttttaaaaaatatggcatatattttatatatctttgatttattccagcattctttattaaatttccttattaaataatcattttccctcacagaactcaaatgttatttctgtaaagttcccatatataattttttggtagggggctatttggcaatatcctttgacataacaatttttcctctaggaatttatctgccagaaatagtttatcaagtgagcaagagatatgcacaagaatgttcattgaagcattaaatattgaaaaattggaagcaactctatttttgaaacaaatgattagatatcaaaatggaataatagaatagttttcaactattgcaaagaatttattagcccaataactcaaaggcatatttttcagtggtgataagaatattgtagaaagtatgtatgatatgcttctactgtcatactattactaagctgtgtatctttatttcacacaaccaaagacatatgtagtatttaatagttttgaatatgaacagctgctcttttctcttctttctatgcctcacttcctctcctctcccagtattcaggcaacacataggaccacaggacaaaagttaatttcagctttggaatttcaaaatagacttttgtaatctataatagagacattgatttgaggagaaggcttgcatagtctccattccaaggcagagataaaggacccctggcatcaggtttatgtcttaaaccttgaacacgaacaccgaggctcactgtccgccaggtccatgcaaaagagataaagattacagtagctgcaggaaggagaggaagctgggtggagaatctgagtgttctcatttaagttttggatgggtatctgtgaagtgatctttagggtggggatccccctagtgtggggaaggaaggtctggatcacaggccccagacagttggagacataagagtcagagacccctctgaactctgtgaaggtggagacccccaccaacatcctctgaaccaggtataggcagcatcagaagattagaaattggcagggtgggggtaggaggcaggtctagacagagaaagcctgtgagtgcccctcccaggggagcacaggatagcatctggaagctttccacgtgtccccttgagggggactttgagaaactgaggacccaagtctcttggaccagaagaaggctcacagctgagaaaggggtgccccagtgtgtttggcttgggttgatcagtacatttgagaaacttggatatctaagagtccattagttgggatagatcctgaagacggagggcaggggaaaagtatatctaggttcaagctagcatggaaagatgacccctccagtgccccactgcacacttcagcaccgtgtaagctccctaggatgaagatgcaattccagggagaagtaggagacaggaggcagttaaagccacagggaaaactcttatttgtctgggagcattcttatttgcctgatctcactttccattgcttaaaattacgtttctgccactaagtggaatggggcttgggatagaaataaaattcaatcacaaaaaactaaagatgccctcttttgcacacctcctgaatttgtgacctgtgaaattcatgccttgtgcatatatatttagataggcacagaaaaacatctggaagaattcataacaagctgttcccagtggtaacaaagtttaatttcctacactgaacatggatcacttttgcaataaaaatgcaaatctagaaaaatatttcaaagtatgtcatgttcattgtaggcaatttggaaaatataaaaagtacatttaaaaattaaatcatctgaattcccaccatgtagatataaccatcgttaatagttttatttattttctttcatctgtctatgcatatatgttcacagcatatagatatgcatatattcaacatgtatatattctttttacagaactagagttatgtggtttttgtgtgtcatcctatatttttttcttttaatgctgttaatgagcattttcccatgctattaaacattcttcaaaaatgcactttaaaaggttcaggctctgtgaggtatagactataatttctaaatacagatgagaaaacgagggtcagaaaggttaaataacttacccaaggacacccagctggcatatagtgcagccaggatttgaacctatatcttcctgattatgaagaccaaccctcctaaggtgggaagaataaatgaatacacatcacacatcacagattgatgaaaagcacctgatatatgtgggtccttaatacatacaattcttctccagtctccccatcctgtgatctggccttccccaagcagaatggttcttatattggtagtcagtcttggtttatagcaacccttctgaggaagctcttggagcttgagcggctgctttggcaccctgagcccctgcctcggtctcttctcctctccaaggttctggctgatgctttcttcagccagggtctggctctgcctctttgtgtttcccatgccactgaacccagttgtccccatgggtcaacagtgcttttgtccaggccatccagaagtttaacagaacctccacagaagacaagatttaaacattgcaggcagtcaaagttctccctgcaccctttaaatttaaagcaatccattggatgagttattatggaagcagtaactgggttttggttgggagaagcctagggtctataaaattcagataaatcattccatagatatatttccagagctgtaagtcacccagacatcgatagaaacggatgtttctccaatttctttttcagaagccacatcagtgtgtgcaccctggaatctgcatttattattcatcccaatagctttggagagggttgccagcagctctgggggtctgcatatgatatcactactctcagctcagcttcctaagagcagagctgaagctaagtgagatgggccctcctttgaagattcactacacatgggttagaaactcagctgcctctgtgggccagacagagaaggtaaataagagcagagtgttggaaaaaacaagagagtcttggggactgaaccaactggagaggcatgtcccatcaaaaggcattcacattcagttaagaaactactatgataattcctctgacagtttgctactacatctaagagttgtggcaggcagaacaatgccccctgcccacagctgtctctctctctctcttttttttttttttttttttttgagagggagtctcactgtgtcgcccaggctgcagtgcagtggtgcaatctctgctcactgcaacctccgcctcccaggttcaagcgattctcctgcttcagcctcccaagtagccaggattacaggtgtgcaccaccatgcccagctaattttttgtatttttagtagagatgggatttcaccatgttggccaggctggtctcgaactcctgacctcaggtgattctcccactttggcctcccaaagtgctgggattataggcatgaaccaccacactcagcctgtctctgtcttaactcttggaaccaatgaatatgttatgttacaggacgaaagaaaattaaggttgcagatggaattactgttgctaatcagctgaccttaaacagggaacttatttgggttatccaggtgggcgcaatggaatcacaagtgactgtgaaagtgggagagggagacaaagagtcagaggaagacatgactccccaagaaaggcccagaaagacgtgttgctgctgattgtgaagatggaggaaggggccaaggaatgagagtggcttctagaagttggaaagggcaaagaagcacactctatcctagggcctctagacaggaacgcagccctgtcaacaccttgattttagcttagtgagacatctactctaccaaactttgtaggtttttgctaaatcactaaactttgtgtgcttagtcactaaacttgtggtaatttatggcagcatcaataaagagctaatacaggttgtatcctgtctataagctaataagaaagcaatctctgttggatcatggggcccagtaagacctacttgggtagggagaggtggggaagcatagacttgaccttgacctccttgttgaactcaggttggaggaatcaggggtcccccggaggcagtccaggtaggctggcagagaggctgtcctacagaccaggcaccaggcggcctgggactgagcaatgacccacctgctgagggttggcctccagggacaaccatttgacaaggcttggttttccaggaggctacaagtgtcagcatccgtttacaaactaatcaaactttggcaggtttgaacaactatgctcaaatttacttgattaatttattttgaagaaattaactttaaaaagggattttacttaatatactttcatgtgacttttttcggttgaatatgagagattgttgttgctggtattatcaagttgtaattttttaaagctttccaaatcacaggttaaatgactacctgcgattacccagctagaggctggccaaattagcttctggcctgtttctaatctattgttactggtgatgacccatagaggactgggtttttaattggcccccagaatactgttgattagaactggagagccttttgtatattttcagcatgtttactcactatccctgaggtcaaatcctggctcgtttgtatcgtggcattttatgatgtctctgaggctcacttttctcatttgtagaataggaaccatgagagaaactaccccatagcgttgttgtgagagttacgggagacaagccatgtaaaactctgagcacactgcccagcatatagtaagtgctcaaataaaaatattgatttatctcattgttattctaattttgaaatatataagatgaaaaattggagaacgttgtattgaaagtcagggcaagagtagagggtggactctgaccccatccgagcacttagatgctggtaatccactagggaggaatggctgtggctgaacttttccctcaatattgggtcttacttatagaaaatatgtccaagtatttttctccttaattcaggtggattttcctggagaacttgccctagagagttggattctcccatccagattccccctggcaagatctttgggatcataattggaaaggaggcattcatacctctggaagaaactctgttggttgatggctttgtagaatatattaagctcaaaggcttgtcaaattgagaccagatagctaataaatctgggatggagagtctagatgttgatagatcacattggccttatctgaatgatgaataagtatgggaagaagaaacttcttgatgtgaatatctttctgatatttagtgtcaactttgtgttgaacattaagctagccctggttttctcaacctcggcagtgttggaattctgggctgggcacttctttgtggtgggggcagaactgtgcattgtacgatgtttagcagccttcctgacctctacccatttgatacccttgaccccctcacctcaagttttgacaaccccaaatgtccccagacattgccaaatgttccagtgggaggagggcagtggaggtaaaattgcccctggctaaaagctatggggttaggcattggggttacaaaaatgaatcaaactcagctcctatcatctagaatcttacagtttaagaggggagaccctcaagagcaatgggctatgataatatagtcaggtcaaccacaaggtgaactctgagcagaacataagactgagatgagacagggtagggcaggtgataccttcaacacagctactcggctggatacagagagaaatggtccttttctgatgaacacaggtgggtattttgaataacagttttagttttctgatgcccaccggggccagtcagaaggtgctacctttttcccctgctgaaaatgggcccaggctgctctacattttgacctcctgcatctgtgtttcacgttagactgggaagttttcacatcttgttgcacaggccatctttatctttagcatctttgctcttctttagaagtactaatgcttgtccaggccacaccccagactaattaagccagaattgttgggatgaggcctggacactgggattttctgaagctgctcaggtgaatcagatgtgcagggttgaaaaccactggtctcatgtaaaggaaaacagcctgggtgaggatttgagtggaacaaaccaggatattggctggtggtgcctccagaagctgctctccaggtcggtctgggcttggttcacatcagtaaaattgggtaatggccacatctaggaaacaaaagcattattttaatttataaaatcaaattctattgagttgaaaaacaaatgtgaattaaaattaacttaataactgctcttttaacttagtgcaagaagagattgtattaatggcattctaaaactcaccgtctcttagccaaatactttttaattgaacatcaaaataactcaataaaaatattaaatgtccactttttctgtcaaaatagaggcaagtaaacaagggcaaagggatccttatgccaaaaaacataggctaaaggaagctcttaacattgccctctgctctgagcttcccagtaggcaaggcaacaaacagaactggatagaatgcatgaccctcaatgcttactataaggaagaatgccagtccattgggagtgaggcttctattttttctctttttcttttttttttttttagtttggtgcttttttagaaggcatttatcacatgagtttctagataagggacatagaacaacataatggatagtgtctttgcttgcagttttacaaacaatgcaaatgcgattcatgtggctgcctcttatatcagctctggctggaagccaaaggcataaacagtgtgatattctagtttggtgtgaatttttccatggagagctgaaatgatatcatccaggcttagagcttcccagggatttgacttggcagagcttaaaagccttagaagaattaaaatttggtgtttcttaggctgtctttctagctaacttccatctaatttttaagatgtagttcagcatcatctgttccaagaaaccttccctgactccctgaagttgagttaggtatcctaatatgtggtcccataatatcctgtgcaccccacccctccatagaacccctacaccattatacctgtgtatgtgtctgtgttgcagatgatggaccctgaaaggtaggcatgatatcagttatgtttgtattcccagctcatacactggctctggcacatagtaggtcctcataaatatttattaggcatgccaaaactagagtagttcttggtataaggcaaggtagtgtgcagagagtttagagtcttggttttggcaccagattgccaggttgaaatttaggcctttaccactatctagctctgttaccttggacaagtgaaagaattgctctgtgcctctgtttactcatccgaaatacagagctaacaacagcacctacctcacagagttgctgaggggattaaaggaattgacatatgaagcatacttagtacagtgcctggcatatagaaattgctatgcaattggctatgatgattggtgtttttgatgtccccatggctcttttgccagggtgaatgtacagaggggctgagctgtggtcctggctgggcctggcacacagatacttgttattcactcgaaagcagctcccatgtcccagctctgaggcatgtggagggtcaggctgatactctgcgtgtatactggccctccaggctgcctctgttcggaggttgggcaaccttatccatccttctcagagctccctgtccagccacactggggtgattttgggaggatatttgtaatctttaggtcagaactccatctctgaggctttctaccttcttcaggtgacctctcaccctgcctcagtttcccttgggaggcaattgaggggtctttggccatgagcagacttgggatcctcttctggctcagcctcttattttctgtgtgatcttgggtgaataaggaaacatctccagcatctgctgtctcatctttaataattgagacaatagtacccctgatgaagtggctactgtaacgattcagggaagtaatctgtatagagctgttagccgggacccgtcatggtcagcatgtaatcaatattagatgcttttgctcttgactttgtgaaacttacttctatgaagtctatacctggtctttttttccatgacatgaactttctttagaatttatctttatgaaaataaccagaaaagctctggaggccttaaagtaccgaggtggctttatcccaaccaaagtctacaggacttacttgtgggtggggatcagtgcttactaacctgctcctgaagaggcaggaggtccctactcacctcctccctcctggagctgcctggcactcaggccacgcctggcagtggccccagccagcgtgactggcatcctgtctgcttgtggcttctccttgcccttttcatactaacttcattttctgctctaaaagacataggtattttacaaaaaaaggattaggaaagaagacaaattaggcacttttcatcatatttgtactgaaagtgatgtgtaaagtggttttgttgagaacaacatatgatttttgtcccagagcactaaatgtgaatctagactcttagaatatagcccagactctggctccaatccacagctagcctggaggtgtgtcattttgatgagctatttatctttgctctgtgtgtgtgtgtgtgtgtgtgtgtgtgtgtgtgtgtgtccaatctctgcagcttagggttcttccattccatattttggggcatactttgggcacactggactcagagtaacttttctttatacttacgttatttttgagggcaaggagatgttttgctctttcttgacttcacaggatttcaatgacctacttcttcctttaggtctacccaaacctctcactctttcagcccagtacctccatgaagccattcctactattccagcttgctctcacttctcccgtcagaggtccctccagacagcttgcccatccacagactgcatgcactatctgttcctccctacataaccccacagtggagcccaatctgattgaggaaagagacagcatcagtggcttcccttcttgcctgcaaattcaccctcactgaggacagggtacctaggaaaccctcagcctatatttatgttgaaggagctcagatctcctgttctgtacatttttaaatcattcatccttctagaaagatgtgttgatcaaagtgagccagtatgtttgaactatttctttgagcagactattataaatctccagccctcatgcacatcctgttgatataatgtcaatcccgaggttactgatggttccgcacctcttctttctttggattgcttgatgtatgttcatataaatgggctgtggaatgaagttgtaggataagcatttgacattcttcccttctagaagtgataaatcgagcctgcgcccaaaatggacttgtgggcttgatcaagaattctctatgaagttgtgtctgtttcactgcttgattccaaagaacacacagccccaaacagcctccagggcctgaagattggagcagagaattccttgttttatcccaaagtctggccagaaggtccacctttccaaagtgtatgaaaataagttatgtcttagtccattttgtgctgctatcacagaatacctgatattaggtagtatattgaaaaactacctgttggatactatgtttattacctgggtgatgaaataatctgtatacccgtccctcataacatgcaatttacttatataacaagcctgtgtatatacccctgaatctaaaataagtttttttttttttttttttttttttttaaagaacagagatttatttcttatacttctggaggctgggaagtccaaagttgaggagtctgcatcattggcaagggcctttgtgctgtgccatcccatgtcagaaagcaggagggcaagagagggtaagagagagtgagcaggagagcaagagggagtcaaactcacccttttataaggaagccactcttgcaatgctgacattaatctatacatgaggatggtgccccatgacacaaacaccttctattagaccccactctcaactctgttgcattgggaattaagtttctaacacatgtttttttggggatacattcgaaccatagcaagttctatataagaagttttggagtttgggttctcagctagttttccaggcttggtgcagaaaatcgatattccttttattttgttttgctgccgattttccctcttctgtcagcccctgcacaagccatgctcatccctgctgtgccctggtccagccaccttgcatcagtcagtgttcttagtcatcaacaacagaagcctgctctagttagcttaaggaaaaggagaatttattgacttctgatggactttggatttattgacttctaattgattagacaagtctgattggttgcccatgtttatccctgctctcccctaaactattctaaaatgatggcaaagggttaaagtgttgcaaatctacaagatcaaagaattcataagaggagacaacagtggataggtgcttggggccagtttttggaaaatagaaagtggatggagggctgggcacagtggctcatattagcactttgagaggttgaggcaggagcatccctgagtccagaagttggagaccagccagggtaacataatgagactccatctttacaaaaaattaaaaagaaaattaaccaggctttgtagcatgtgcctgtagtaatagctactcaggagactgaggtgggaggatcacttgagcccaggatgtcaagactgcattgagccaggattgtgccactgcactcagcctgggtgatagagggagaccctgtctcaatttttaaaaaagtggatggaagaagggtaactgatgtagcagatgcaaggatgttacagtgttagtgcttggtaataaagatactattgtggggtgagcctggttctgccggcaggcctctgagagcctcagcacccagaaactccagaaagcccaggttaggcaggtggtacaaaccaggaaaaattaagcagagattgacatgttcgatagtagaacctttggctgcttcttctgacctgctcccaggatgccagcggctggagtgctctcttctggcaggatataataggagtcttttctggagaaactgaaggactctggagaaaatacctccaaatgctgacattggggaatcttccattgcaaaggacaggaagtccccctatccacaagtcacacccatacccttcaatgagcttcttaatgcttcatattaaacatgaaaggacaattaaggatcattatgcatttgaggaatgtcttttatatgaaacagagagtacaacacaaagggataccaaagggatccaggacaaactaaataatgtaaggaaaaagagaaaacttcaaaaatgctattattagtcttaaagagattaaaaaatattgcacccttaagacatgaacaggttgctatgaaaaagaacagggagcacaaagcagcaattgaagagaaacatgatgactgaaattttaaaagttcaattgaagtaaagcaaaaaggcaaagaggtatataatgagagagaaaagttgataaaaatgcatggctcaatttagaaagtttaatattctagtagaaattctagagcaagaacagaaaaaataaagaaaaggcaaatatcagagaaataagtaacaaaatatttcagagttaaaggacatgtgtctccagattaaaaagtcctcccaaccatgtagctcttactcaaagtagatgaaaagaacaaccacaccaaggcactgggtagaggggtagggcagggggagagggaaggaaggaggaggaaaaggagaaggaggaaaggggaggagggagagtaggtgacatgaaaagaacaggaatcaaagtggcattaggatgcttaagagtaacaccaggcctggtggctcatgcctgtagtctcagcactttgggaggctaaggcctgcagatcacatgagtttgagaccagcctgggcaacatggcaaaacccagtctctacaaaaaatgcaaaaattaggccagcatagtgttatacacctgtaatctcagctgcttgggagactgaggtgagagattgcttgatcccggaggtcaaggctgaagtgagtcatgatcgcaccactgcactccagtctggatgacagagtgagactctgtctaaaaaaataaaatagaaaaagtaacatccatactagaagatactggagaggtgctatttctgaggaagaattaatattcacatattctatactaagtgaagctatcaatcaatatgatagcaaagttaaaaaaattcatacatggaaatactcaaaaacttacacactgtgaatctttgcttaagaagtttctgtggtaggatgggcttcagaaaaaaaaaataaagtcaaaataccaaaacaagataaaagtaagcataatagcagttacagagaatccaaccagcagagcagaaaggaagtctcatgacagcccctgctcatccaactggagaccaactggtccacacaagagaagggagagagctggaatgggctctctccagggcttaaggaaatggaaagcttattttgttgcattgagcatttggaaaagtacattatattataaatataatataatatataactacaaataaataactataaatataaataaaacaattttgtagttataaataaccacaagttatttgtagttataaataaccgcaagttatttgtagttataaataaccgcaagttatttgtagttataaataaccgcaagttatttgtagttaaaaataaccgcaagttatttgtagttaaaaataaccgcaagttatttgtagttataaataaccgcaagttatttgtagttataaataaccgcaagttatttgtagttataaataactacaagtcagagcaattgttaatgcaaaaaagcaaaagttgtataagcaaggaaataatataatcatagtctactatttggcttagtagtgaatagtatcataaccataatggagtcaatacatttgatttaatttacaaattgtgatacaggtagattggaaatactgggaagggaaatgaaaggatgagaggattaagagacctaagtcctctctgcagtatcaggaacataatagatagtgctaaagttgatcaaccaagtatagcagtgtgaacatgattaaatatgattaagaaatatggaagtaaatcccaaagaaacagatgaaagagttataagtgtttgcctctggggagcaggactgggagtggcattaggaccagggactgccatttgtcaatagaaggcttttaattctgccttttaaaaattaagatttagtatagaataataggcttagaaactattgtctgtaattgtaacattgtgctttgaaattactcagtttattctcccttttaaaacatttgattgtacccttatacggcacaaggctcttgccagtttttgatatttaaattttaaaaataaatattatcttccctattgtttgtataaagttttagaatggagttaataagaaataaaagtaatttattcgaatgacactggtcaactcacagaggtgggctgaatgctggagaactaggcccagaaagccatgggaggctggatggaacagatgttgctgaggttaccctgggtcagtctggataagacaccttcggtggaccccaacactgctgttctcgtggggagtgagttaaacctttgagtcactatctcaagattcaaggggatctgctgtgctaagcctaggtcctgtgctggccttgcacacaatgggcatctccacacaccaaagactctctgatatggggtagacaaaatcctacaactgtttctcacacaccccaatgtgggacaccctttccttttctcccaaaccactggattcctcaaactattgggaacctgcccccatagcattttcgaacatattgagacccaagcatcagtcttgtctatctatctcccagactttgcagatgaaaaaacagtgaaatccaaggagtttaaaagcaaaagaggaaaagcaagaactaggtttggagtcctcttcacatatatttccctggttgatcaaacagggtactagtctgctaaagtttacctttgctcacgatctaaggtgaagagggtaatgttggaagacaagaagaggttccaaaatattctgaatggtttgtgtagagcagtgaactgattccagtaacatgacatttacaaggataaagatgaaggcttccagtgaggcctgggaaccccctgaaccagtacagggaatgtaggtgtatgtttgtgtgtataactcattattttaaaaatacatccctggggcttgaaagtggggcagctggatgtgagctgtgctgtccccaggaatgtgagggctccgcaatagtgaatcagtcgtggtgcaagggggaaagggagcttcctgtcgtgccacttttggcccagctcccagccttcacaggtcaccagttctgcagctggagtgacttggtgtctgcaggccaagcctgccagtgccgattcccacactggaggacggggactgtgcaggctgccttgctgctgcataatctgccttatccttgcagacctttcccttttgcctgagtgaagcccttgccctatccctgtccgctcctgtgattactcatctctcccaaactttatgtatttatgtaagtgttttagagatgcaatcttgctatattgcccaggctggtctcaagctcccagccctaaacgatcctccgcctctttctccagagcagctggatcacaggtgtgagccaccacacctggtctctcccaaactgttaagattgtcctctccaacttcctgctgcctgagggagtttagtgggatgaatcatcatcttcctcattgagcctatccagcatctgtctttatgcagctgcatctggaagtcacatcaggttcctttttctccttgtaccttactcagttttcaacctatgactccatcccatcaatgttttctttctaaacgctttaagctccatccttttcttcctgggccaatgccccataccctgctgtcgtcctcattgcctcttttctggactattgtaactacttttcagcaaatttttaaaatgctctcgcttgtgaaattcacctccacatggccaggctggcctatctggaatccagatctgaccatactcttccatcctaacttccttccatggatgcccaagtctgcatctccatttacctgattctgttcctgttgtaacctcagtgtcctgtgaaatattgatgtgtttctcgaacaaagaaagtgaatattctggggagattcgtttgaaaaataaacaccgggtatagccaattttgacaagtttctgggaaaagaggacttgtttgtttagtatgctttgtcattctcaagctggagatataagtgcagtatatctccaactttcccacagatttttttttttttttacaagaaactttacatcttctaagaccctcacatcctgtggaacacaatctggaaactcgcagcttatggggtaaaagccaggctctgctgcctggcagaagaccctgttgactgggacctggtagtgtttcaggtaataactcatgcctcatgccactgatcctcccacctcgggtattaagccatggggtgaccaacagtggagatgcatcatgtgcacatttaactcacagtccattggttctcaggccagatgatgccacatctgcctcaacaggcagtcggcatagtgaagcctgacatagtttgtgtgccaggacctgctggggagagtgcatgcatggtctagagggcttctcacgtggtcagcttgcccacacacttcctgtcctaacttgcaaggcaggaagagtttccaaagtggtctgagcatttgaattagagcagtggcctgagagaccagggctaggtaagtgggtgatgatttagttaatacactcagggaagaaaatgaagctaattgagggctgtagagaaatagtgattgataaaggttaggggaacagatacagggttctttacacaaatgatgttttctgtaccatttcatatccatgaattaagaaatctttatggctaattttgtctaattgatttttgcctcatctggtaactttagattcaaatcctcactcacacgatgtgaggatgtggctccaccacagtccctacaaatcgaatgccctttcacacctccaggcttctgcacactgtctccttagaagccctgtatcacagttttctctctaagccatgtcattctgtgggtggggccttttcaggtgctttgtgctggcaatggggtgggcgttgggcaggtgggccacacccctgaggactaagagcaggcatctttggtttctgattctgtttctaccttctataagggccaaatgcaatttcctggcttactgtgaggtccccaagagctttggggaaaaactaagctcttggccattcccaggtctgggacccaactgcttgggggctttgtgcttggagaggggctgtcttaaagtgaagcaaaatttacattgtggatgctaaaaatagtttccttctccccacacttttattgctgaatttgcaatatcctctcttccttactccctaagacctcagagccccccgtggtctctcagtcactttctgtggagccagagtcccaaattgagtgcccaggtggccgaggtaagaggtaaacaatcgtttatgccccagctgtcgcaccatccacctcttctcccccagtgtactggccacctcccctagttttcccgtgtcacaaatccagagacttgtttcctgacagtttctgggccaggagttcctccctagcaccatgaggtagaagaagcttatatctccagaactaaaaagcagatatttttctttctattccattctccaaaaagtcaggctcgtaaaaaagaatacaaattatactcagcagctcttatcagcttggtaaagaattgctactttcaactttattgccttaagaagaattcacatgtttccatcttttaaaaatgatttgggttgagggaaggaatttgattcatgtgcagaagtggcttgcatgagcatgatttgaaggggtcacagcattaaccttgagcgctaatgctttaattgagcagctgggaaggtgtagctattctcccagcggatgtacccgctctgggtcaggagctctgagactgacagctgcactgggagggagggactctcctgtccaaaatggctccacaccctccttcagcagtatctggtgctgtggtccctggagttggtctttggatgcaggcagcagcttctcaagctccagtatgagggaggagaaaacatttctaatcagttttggactttgcttgtatttgaaaatcacctgaagctggagctgaacagcagagtgtatgagaaatggctcaacacagccacctgccaccccagggccgtgtcccctgccctcagggaccgagtcatgagattgttcacagtgcacactgcagaggctggtggctgcccccgccaaaccagggtgggcataaataatctcagaagtgatttgttccactgtacatccaggtcctctaaagaagttgtgtgacagcatccatgtggccaagggcctgaatgtcttgctcctctgtgagacaagatcggatagaaaagctgggctccgttgcctcccatcaggacttagcctgaatgcctgtaagaacaagaacatggggggccttatttggtttctgtgccctccaggtggcagggaaattatggaccattgattaaaatccaagtatccattggccaatactcattggcgcctcctggcttcacttctccaagttgatcttattaaacagatcgtgcctgtgagcaggctccatttcatttttctgctgatattaacgtttccttataaattgtccacatgtagcatattctcactttttattatagtaaattgcactccctgcacagccctggaagctgcctctatttcatctgaaggatccacaaatgatctgtaatgaatcttcattcccccggggctgtgagcgggcgcttctgccatccacatgaacagggaaggcagttcagactggctgtcgagctcagacttggtcaacaagaaggactgaggccagggaggtctaatgatttactagaaattgttcacatctatcagaattttacatgaatttagtcaattattctttctttctttcttgtttttccatagcaacataatagtttttcagagatctgagccaatgtcaaaaaagtctaatgctgaacactctctcttccagtgaactctctttcagtaatatctttttaaatgtcattgaccaaactagtccagaacttactatgttgttaggcatgatatatgggaactagcatcaggaggttcaacgctcagtacaaatgaagaaacaattgtatcctggaggaaaagctctagaatttgatcatgtttccatcacctcctaaaggtcagggcatcttgcattcctccactttaagttcactttgtttctttctcagatcctctcagatgtgtagaaagggggtgttaattgcaaatacaggcagcactaactttgcatggcacaatgttaaccaaaaatcaagtgtataatgaagttcgtgcaaagtgaggacactagttccatatgcatgggttttgtttaccagagtaccatgcaccatgcaaagcaaaggccacctgtacattcatattctttttaactgtagtaaggtttctgtttatgctcctggccttccttctactcagctctggaaatgtgaatcacccattcattcattctgtaggcacattttgaagttcactgtctgccaggtgctgtgtcccacaagtggcttcgtggtaattagaccaggctttggcctccaggagctcacttcctagtgagggactagaggctactccccatatgcaaaaaaatcctttgacaaccagaggtgcatgtgatccaggaattttgaaagggggtgacaggaaactctggaaaccaggatcagattttgcagaaggccctgtagctctccaggcccccactatccagtcaccactatcactgtcgcctgaatcaccttctggcttagctgttgtttttgcaccaaacacctatgaaacatgcagagattgagtttcgtcttttcttggtgcccaagtcagtggaacacggtagaaaccatatgggttttgcattggaaaggcctggttacactgactttctgggagactttgggaaaatcacttcatccttctgagtcttggtttttccatttgtaggctgcagctcagtagcctctttcagtaggccattgtgaggactcagggagggatcgtgtgtagagggcttagctcagggtctgggctggatgaggtgttctgtaaatgccagcgattgcccccagcctgcaaccagccttcccctccagcctttcccagccagtgccttccctgaactcctaagaggcaggttcagctttcttccaggaaaacagccctctcagcctcccccagagctgtggtttagtgcttcacagggtaaattctgatacagctttctcagatggctttcctagagctgggagtgattgccttgtctccaccatccttcagtgacctgagcccatgcactcccccatgttcaactgcttttccctctgcccagatggggtgtttcctgttcctgccaagggtgggggccttggacttcaaggatcctcgagcaaagagatgggtgagatgggaacagatgaccatcaaggaggggctggctcctgggaaaggcttgggacaaaatactggaaaagagaccttctgggatccaagattccccagtgggatctaagaataaggatggagccagaattaggagtcttgggagatgaagagaacttcagggcagttttctggtgaaacaaagaccaaagaggctccagagacaaggctggggcaaggagaagcagctgagtcagcatcttgggacgtttttccaagcaggcaggcccccaggagacacagggtggctgagaaagttctgtgataaccgctctttaggggtttcctcatgcttcccggcataacttctgaaaactcgggcctcatggtgtctgctttgctgatttccttttaaacaggctcttcaaataatccatcctcctgcagctagctacaccccttccttgcaaatggaggggcgttgcgctcctgcatgctttggaggggtgacattgcacagagagcattgttcctaaatgacatgttgttgcaaaggcagcggtgggcctttaacgtgagctcaatatctgtccttgggaaagtgccaggccctgggcttcacggggggaatgttcccaaatgttagagttggggttttaaaaagatgctaattgctgacaagctttcattatctcaggctcccagtgttggggggatgcctagataagtggtcaacaattaacacatacataaataattggtggcatttgcactttgtaaaataaatcctcagggatgtgtttggaaggcttccatgtggaggttttttccactccatttactattcctttaggccaagataaagagaaacagtctcacacttaagaaatgcaagtggaataatggtttcaggcttatgagaacaagttaacctggagaaggacagcaccgtgacttataatggtgttttctcagatatgagaaaaaagaccattttgttcccattgttacggggccaggttcagacccaaaaactttttcagacagttatctggggctttcagagagcagcatgaccaaaggaaagaacacaggctttggagacagttgggccgtagttcaaatctaacctctgctgaatactggctaagggaccttctgcaagatacgagtctagattgaggtatcagttccccatctgtgaagcagggataagaacactgcatggcttgttaagttgttgggagtaaatgaggtgtgtgggttgtaaagcagaggagatgttgtattgaagtatcttggggggtggttaataaaagcaagctctcgtcgcccttggaaatggctccaacttagtcttgagtgaaaagccaaggacacagaggaaggggacccagactggagatgcctcctccaatgcgctcagcctcactgtcttctctacttccttccaggctcttggatattagaaccaatcctcaccaccatatggtccaggggcagctgtcagctctccccagcaccagtctaggagagctgcctccacccttgacattcttgtcagtgctcagggactcctttctgtgcagagtctgtttggaagctgggagccagtacgtggcccacatctatttccctatgaaaatcgtgagatcagggtggccagggcaggacccaaatgtcctctggccctcagtgggcctgcagaatggcctgttggtgtcctgtgtcacttacaactcagctcttgggtgtcactgggaaaaggcacctgaggttcagattggggctgttgctctcgagcagggagacacattcccttccacagtcggctccccagacgtgggaagaacagctgccttcggccttctttagctggagtttgcctataacagcacacttttctttccagagggtggaatgtgggtgtcaagatgtggatatacacataagtcaacacacgtgtggacactcagctgtgccttttacccctggctgactgcacccagcctcgcagctgtctcatgtgccagtaccaccatcagcatctgctgtctcctccattcaaaaggggctagaagagaagtcagctggatgctttgcaacttcttacatccttaattcttcttctgaagttctgtgtttgccaatgtatcatggccacaggagccaggcagatgggcccagtggtttggctaggtctcgtgggattcacagcaatttagaggggtgcaggcatctggccaccgcagcaattcctttgggcttattgggccctagttcccagctcccacggggtttgtgtccctcagccacagtgtctagcttcaggagagaagtctaactgcagacagcagggaaccagccaccccacctgctgggagcccaccctgagcagaaggccggccccccttccctccccgcccacaggatacaggggctgccctttgcttgtctgaccgggtcatcacttctgtgctgatgcccacagcattatgcagctcgatccacactgtggccaagatgggagggaaacaccacgtcctgctgccttgaaggggagcacatggaggtggtggtgcccaccactttgcaaagctgtattgattgttggtctttttgccctggtgtatccatgatggcagagatgaggctcctggtccactcccctacccaggagaattaggatggcctgttggggttgggtgggctctgtctgttgaatgaaggaaggaaggaatgagggattatgcacgtgtacttcaagagaccatcgaatcaagagcaggctggagactccagtagaaggaacgggaggaactttgcgctgactgatcatctttagtgagagccttcctgggctggaagtgtcacctgtaatttcatttgactctcacaataaccctaagtgggaggtgtttgtctcaagttgacttcgcagaagtagacttggagatgaatttttgtgtgtgacaatgatttattaaaaattatggggacttaaaaaaagaaagacagcagggaagtggggacttggaacaggaacataaaggaagccaaacaaggtgattttggctccatcctgaaaagctgagatcacactctggagaagtccccagtagggagcaaggcagctgggatttgttttcgtggcactctgggcccctggttaggggtgtgcattccaaggcaccgtgagtgccaagcagggttcaggcagcctgaattgggggtgttggctggtgttgggagtgagcaaacatgctgagtcagtgtaataaaaaatgctaacaggattcacagggactgtgggcagagccccctgtagcactgttggtattcaaaagccttatgggtgtggaaactgcagctcagagaagtgaaaaggctcacccaggagcactcagccaggaagtggcagaactgggattccaatgtactctgcctgcctgctggaactctctatagtgttctcactctgcagacgaaagggaggacttgcctccacctgctgcagttgtagctggagaggaaaaggaaaagggcagcacttagaaggggaattaatggtgctgggagggacattgcccactggggtgtgagcatttagggctcttcccacagagctggcagccctccagtaattgctggagtggcgcgggttgatgggggacagggggaggcaggcagtgttcctgctaaatctgctgtagcttctccttctctccatctatctcagcctctgtgcgagtggcaccctctggaaaaggctgcagaaaagcactatttatctccatgtggggaaaagaggcttaacaaattagctgatgcttaattggtgaggaaaagtaggacagaaaagttgaccagttgtcctgtggggttttctgatcaattgtctccaccaatatcttccctgcatgggtctgatactaggtggaagtacttcttagggtggccaaggctcccacctgctccctggggtctcccagcaactgagtcaggttgtctgcactgctggcttcttccaggacaagcagagaacctctcacctgcacaggtatacccagaccttcagattcacagaactacatattctgaagcagggctctcagcccctgaagccaagaggcagggtcagagctctgaaacagcacaggacctcagacacagcacaattaccagtgaattaggatccctagcagtggggcctggggaccctcttttttaaagctccctaggaggttcttaaacacagccggactggagaatcattgctgaagaatgtcagtgcatgataaagctttacctctcacaaatggtcaaccttcttagaaaacacggcactgtaaagagagcactgctcaccttctgctcaggcacttcctgggatgggacgtcgctactcctgaggcaccccatttcatcttgaatgacttggaaagtcagaaagttgtctcctatattgaattgatatctgcctccctgattatgggagccattggctgtaggtcaacactcagaggatgcatagagcaattccaatctctcttgcacatgacaatttaaagacacctatattgtcccacctgtaagcatccctgatcactttaactgtccctctccatgactgggctatagtgtgcattgtccttcatcaagtggggtgacctggttaggtcaacccttcaaggggtggaacaaactcctcccacaccctcctttccatgagttgagctagagcccagcgatgtgcttttacataccttgggagacgggaaggggcaagtgttatctgttccttttacgaaggaacagagaccagagtggttaagtgacagctaggtggaggcagtcccctttggtttttcctcaagagtgttgctttcaaacttcatttccccatttgcctttttgctcctggaaactgagtgtaggactttgagtttggtcttgctaaaccacaagtctttagattcagttcagtgttccagccactgagatgttatgacatcctccagatttgcatctgtgcacatttgataagagtattgccagtgtcttccacatgagtgtcaaggaaatgttgaattgttgggaatcgaggtgagctagagcccagcgatgcgctcagagcattctcagcccaccctgtctccacttctccctccacctcttcatcagtgcttccaggcttttgaagacctccctgaaagtctgcatgttgacaggagagaggctctggatggggtggctgagactccacgctgaagtgtcctcctttctctatcctgactgaagattcctttgagctctggctctttagcccttgcagcttctctggagagagcccggttaactgagtttgtagaaaggggaggaaagtgtcttcaggatacagccttgtagcatacccaggtacatggcttagcatcccttgcagcctcttttctttccagtgcaagagagatgcaccctgtgcatgacagtttgcaggctgcagcaccatgcagacctagggtcatttgtggggtcgttggcacaggccccgacacctccatgcctcatttgttgggagtgagtcagatctctgtgtactgatgaggaaagatatttgtgttacactgataaatcaaaaactagagtcttaactggatatgtatttcatggtctgattttaatgaaaacacttgtctgatatctatttgtagctatttacttgcggaggtaactgtaaaatcttctagaaggtgacacctcaaacaacatttagagggtaaatttggagggataaagggggaattttcactatgtcagcatattttttttaatgggatgggattatgggatgttgagcatttttatgtttctgcattttttttttgataaaaggaataataaaattacattacaaacaaaaaaacaggactccaatctgatagctcttgtccaggttcatagtcagcctggctcagtgcccaggctcagcaagcacttggcacctgctcacgggatgtattcatacaggacatgcttggaaaccatcagtctcttccaattcttccaatctgttggcttttcaattgaaggagagggaaagcactcataaacacatacaggaaacaaaataattaactgagttctgtctgccttggccttccacttcatttgcataatcaacaatgtttgctgaatacctgctgtgtgctggttacagctattgggacacagctgtgacctaggagatatggcctttgacataatggcagaggagatagacaataagaaatattctagcagaggagacagacaataagaaataagtaaactgatagccattcaagcacaaagatggcaagtgccataaagaaacagaacaaaacactaatagagagttacgggatggggctacggcccaggagctacaaagagctttgttctatggatcctaaagaactgaaggaaactcggagccccagagctgctgtgagctgctgtcttcctgaatgtcactcagtacagctggactagacaagcccccataaatccctcgttccagtttcctgattctgtagcctggagtaatgataacactcatcccctaagcgcccctgcagaaaggtgtttgcaggcattcctagggaaggggggctgtgcctgtgcctgtgcctgtgaccctgtgctgcctgcaggaacccaagcgtctaatcttgctctgggctggtgcaggagtgcgtggagggagagcaggaaatcagatgtctgtgttcagatgaagcttcttgcagctaaggcagccagagcaggccccagggggatggcatgttttgtgaggaaaatattctccaagaacaatgtttataaaactctgtctcggcaatcatcctgtgtctgccagcttctgtcttgcttctgttcatgttcgttctttttctctctgcaggccgtggagaccaacctggcttccaaggacagccactgggtctttgtgaatgaggtaagggctctagaaatgtgatgagcacggcctggactgagcccctagccccttgtaaagctcagtgtgattcttttcagttcaattctgacttagggggctgttgtgaatcctggggctccacctagcccaggcaaaaactcaaagagttgaacttgacctagcagggtgctcacctggcaggtgggaacgagagaaagaatcctgacctgggtccatgaggaagtcaaaagtcagagggcagtggtggcagggatgaggtgtgctaggtgaggtgaggcagccagtgggagccaggggctggagcaattagggcaggtcatgaattgggatgcagagggggtggggcaaaggaatgagtaggagaggaaggctgaatttcatgcaagatggtaagggtgtgcatgagtgtgagcaagagtgtgtatgcagggtgtgcacatgcgtgcgagagtgtgaatccaggtgtgtgtgtgtatgtctgtgtttatgatgtgagtgtgtatgtgtgtttgtgtatgagttgtgtggtgtgtaggtgtgagtgtgtgaacatgcatgttcgtggatgtgtgtgtgcaggtgtgtgtatatgtgtgtggatgtgtttgagtgtgtgacaggtatgtgcatgcatgtgcaagtgtatgtgtgtgtatatgtgtgtctgtgtgtgtgtgcatgtataaatgtatgtgtgaatatgtgtgtgattgtgcatgtacaagtgtgtatgtgtctttgtgtgtgaattgaatgtgttgagtgtatgtacaggggtgtgcatgtgcaaattttatgtgtgcatgtgagtgtgtatgtatgtatgagtgtgtgtgcatgagtgtgtatacgtgagtttgtgtatgtatatgtttgggtgtgtatgtatgaaagtgcatatatctgtatatgagtttgtgtgaatgctgtgtgggttgtatgtgcatgtgtgtttgtgtgtgcatgcgtgtgtgtaagtatgtttgtgtgtgcaaccagtacgtgtagggataagtgtacccatgtaaagggagtaaatagaaagtctctcccatgactgaccatcccaccagtttggccccagggaggaatggcaacaccagggatcgtggtggcctggcctgcttttcattacttgtaccctgtctggccctggcctcctccacgctgcaggcattgcataagagtggcctgaaatcacacactctagctttcccaaagaatcccctctgcccacatatcctttgaggagcactaccggggtggcctgtgtgacctcagtgcgctatattcactaaaagctgactcagaatgtgttcctggtgcaagctttcatcatggctatggccttcagctgctcctaaattactgatcaatttctaatggcttcattctggaagatgcaggtttattatgtaggtaattcattcttttatgatgtctgtttcctcattagttctttgctaatatggctgaaatagtcttgggtggcttattttaataattgtgcaggtagtatcagattgtaactacttgcaaagtccacttttcgtagattttcctccatgaattcacatcttattagctccatgtccacagagggcagctggggacgtgcagtaaccgtccatttaccgtggggtgcaggtggttgtgctggtaattagaagggacatgactgccgcctcctgttttcagagcctgtgagagactgccttgatccttgagaagtttggattctctggggtttgctgacttctctgtggctcttcatagtccagttttctttgttccaaagaaacgatgcattccatgtggccctgaagtcaaatgtctgatgctggttttacttttttgatgaatcctccaaactggatagccagtgtttctctgttgccagtcttcaaaagaattactccgtttttacattcctaacctgttttcttttctttctccaaatccccacccaccctcaggggccccctgtctgtccctcttgactcactcttcagggctggcgttaacttcagactaaccagtgtgcggtgcccctagggcattccatactggtaggcacattggcattactggggcagctggaacccagggtttagtgtcatcaggaggagtcagatatggggtatacctgttggagccacactggagcggcttctactgagaggattgtggtgtctcaccatggccagcagtgtaccctgtgccagcccggcagtgcacatggatggtgtgaatatctctgagctgagtgtgtcctcctccaaatgtgaggggcctccagggagcctcatcttcctcctttcttggcttccttttctatgaggcaagggacaacatctaatatttctttttttatctttattttttattttttgagactggagtcttgttctgtcacccaggctgaagtgcagtggtgtgatctcagctcactgcaacctctgcctcccgggctcaagcaattctcctgcctcagcctcctgagtagctgggactacaggcgtgtgccagctcacccagctaatctttgtatttttagtagggcggggttttatcatgttggccaggctggcctcgaactcccgacctcaagtgatctgccctcctcagcctcccaaagtgctggggatacaggcgtgagccaccatgcccagccagctaatatttcttaatcacctactatgtgccaggcacttgtcagtgcatttgttaccttcttagtcctcatcaacagccctgtgtggcggttgtcattatcctcattttgcagatgggaaaacagagtctccagaggttaaatcacttgttcaaggtcatgcagctattaatggtgtatctgggatcctatttgaggactgtctggctccaaatttttccatcaaacagtagtttcatgcacatggccttggcaaagatctataactcacagtcagtatctgattcagtgaagtcagtcagtgggggtcaggtatgcacactgatggggaatactcttgggctggcctttggtgccagctcagggacttttttgaagtcttctatcagaaggtagggcctgttggaaagctttcacccaggcaccccagggtagcctctggttaaggaccgtggtgttttccaaattacaagtaggcttatccttaggatccagctatactcaggactactgtttccggttttagcatggccccaattgaacacaaaagtcctgttattcttattataatgtgatatcattttaggctttgctcagtttttaagctatccaagtatagagccacagacaaatggtttctcagccaccttcctgtttgtcttatataatcactagagataaaataagggggaaaataaagaaaaagagaaagtcaggggcaggcatttactggctcactttccaacatgctccagaattcagctgcttcactgggtccttgtcttcccacctcttgaaactgctccccacttctctggaggaagttcagttcctcaaacaagctcaggtctgtgcctccccgaccaccgcaggtgtctttggggcctccagcatggccctccagctgtgcccccagctccctctcattccttacaggctctgcctttcagtttcctcctctgtatttgatttgttttatgcattttcctggattcagaataaacacttgagggcacacgtttttatttgctttctttacatctaccctcttttctttctggtgagtattggtgctacgtattacagacctggtttatttggagacgaaataattgcacgcagaggaagctttgtgagtgtgagtcctaccaacagttcctataggcctctgggcactactgtggggacactggagagcggatgtgtttttatatctgctagaagtatttaaagaatatttttattgactgattaggttgcagattaccttagagagggtaggggattcaaaagaacttgtggaaaacaaaatgaaccattagtcaaggtggccactgaactgtgagtcccttgagggcatggccagattcagctcatcactgaatcctcaatgccctgagcaaggaatagattcttcaaaggtttgtttgaaggcaggtcaatgtacatagtgtagagcaaattgcattgacaagcatttccctgtctgcctcagagaaaagacaaaggcaacaattaagtcctgagtttcagcgatggaaaggacctctctgggtcattcattagatgttgccaagttcaagcccagtcagccttgactctggatgagctgggtggcttttggagcctctttagcagctgaggtaaaatgtttcctctccacacatcctccagcagatgccaggagagtcagtgatccctgtgggtctggcctcttgggaactttgtgcagggaattctcctatagaaaaatcagtatgactctccagcctcttgaagaaccaaggttgatggggacttgaagcactgtgtttgttgctgggcagcttccattgttacatgaattcttccagacattgaaccaaagcacacacatactttgttggaaatggtttaagatgcttaacagatgatgtgggtatgcacacataacctttgcacctgggttttctcagagagtgagtctctaagaggtgatctgtgggtcagcagcggccaggaggaggtgacttctaaaaagggaggaggtatagtcagcaggcccttgccacttcttcccgattgtcagtgtaagtcggtgactccacatctcacgtccattccaaaccttgcccttgagctccagatccagagatccagcttgactcaagatcctcttgacttggccacttggaagctccatcaccacctcgaactcagcgtacttctttccaaactcaccatcctccccaaaactggttctctcttggtgctcctgatctcagagaccactgtccccatccttctggttggctcctcagacacagaaaaaacaaaggcatgataaaagaaaaagactgtgatatgaatgctgaatcacatagctttaagaaatctgcccacttcatccagcctgctgcagccctctgcaggatgaccctgaccccacatttatacccttatttacttcttactattgcgttcatatctcatgggtcatccctgcaaatggatgagtgacttctttcttgcatttatttttccctcctagctttggggttttggcagggtttttctttccacctgccatgtccttctgaatctgtgattgtctaggacttccctttcttgcagacatctgcttaacattgcctctgccaaaaggacttctgtatttccccagtagggtgattttttcacagcctcaccccagttctgctgtgttggggaattgatgcacatgcctgattccctgaacaagctgatctcttttctctgaggttccctaaagttcctagcatgagggtctgacacacagaagagctcactgggttaaacaatctgactgtatcctaagagaccccccatctgccacccaaaggacaaagtcatcccagtgtgtggtcttcttcagcaccttctgcctagatgctctcctgtttttgagtctcaggccccagcccccatcttatcacttacactagtttgtcaccaacgagtactcagtgaggatccttagggatcagtccttgcccttagagtggcctctgtcaacagtccagggacatcactccagactttcaaatcttccctatcctaaagcacacaccaaggtaaaacaaatgaaaataagattatgcaccacatatataatgtgggagaggaagatgcgaatgctctaattgaagaaaacaaagaaaaagaccatgatatgaatgctgaatcacaaagcttcaagaaatctctatttgggacccagagaaagagagggaaggaaaagatttttttcttccttttattttgaagattccaattctgttggactgttcagtccctataccatttaccatcttcaaatttaatttagtaacactcgaaaacaattacgtttgtcataatctttttacttgtttctctcccagcctcattgaggaatctttgaggacagggagcatatcttactgcctctgtagtcccagctcagaactcttgaatgaagaccaggagttgccatttatcagaccttagatggagccagacattgtttttgagtatcaccttcattatgtttttttaattattattactgaaaaagtaacagctttgttgaggtttaattgacatgcaatacatacaatacttaagtgtacaagttgttaaatttggcatatgtatatacccaggaaaccataaccacaatagaggtagtgaacgtatctgtcaccccaaaagtgccctcatggtcctcaggaatgccaccctcctggcccactctcacccactctctaggcaactactgatctgtttctggctctactgattatttgtatctttgcgttttatgtaagtggaattatggagtgtgtactcttctgcttttggtatggcttattttactcaatgaaattattttgagattcatcttatgttgcaatgtgtagcaatagttctttccttttaattgatgaggaatatttatttgttcatggatataccacaatatgattatctgttccgctgttgatggacatttgggttgttttaggttttttgctattacaaataaagctactatgaacatttatgtataagtctttgtatggacatatactttcctttttctggggctcatacctacaagtggaattgccaacccctatggtagatttatgttaacttttcaagaaactgccaagttgctgagagttccagttgcttcatatcctcttcggtacttggtatggtcggggtttttgattatagtcactctgatgggtgtgtaatggtcctcactgtgatgttgatttttcatttccctcataactgacaatacttcctagcatttttcttgtgcttatttgccatttagatctaggtatcttcttggcaaagtatctgtttaaacaacttacccatttatattggattttttgttttcttattattgagttctgaaaattctttttacattgggataaaagattttttaaaaatcagatatatactttgtaaatattttctcccagcctgtggcttatcttttcagttgagcactgtcttttgaagaacagacattttaaatttttatgaagtttaacttatcaatttattcttttaagaattatgtttttcgtgtagtatctgaaaactgcctggactcttgattctattccattgatctatttttttctgtctttatgccaatccgacattcttttgattactatagctttagctttacgatacgatttgaaattacattttgttaggctcctgccttgttcttcattttcaagattgttttggttatcttaggtccttgaaatttttgtatacatttaaaatcagcttgtcagcttctaaaaaaagctgactgggattttatttgggattgcagtgaatctgtactccatttttgggagaattgatgtcataaaaatagtgagtcatctcacccacaaacaagacatatcttcctaattatttagattttctttaatttctctcaatgttttatcttttacagtgtacagatttttcacatatttttgtgagatttatcccttagaattttatattgtcagtgctactgaaaattatagtttaaaacaaattttaatttccagttgttcattggtagaacatacaaatgcaattgatttttgcatattgatcttgtatcctagaactttgctaaacccacttaccaaaactagtggagtttttcatagattccattagattttcttagagaaaatattcttgactatcatgtcctctgggaatatgacagttttacctcttcctttccatctggataccttgtatttcttttttctgcctgattgcactgattagtacctccagttcaatattgaatataagtggtgacaggagacatcattttcgtattcctgatattagagggaacacacacagtttttcatcattaagtatcaggttagctgtaagttgtttatagatgttctttatcagattgggaaagttctcttccattcctagactggtgagtttttatcaggaaatgataatggattttatctaatgctttttctgcatctgttcagatgatcatatggtttttctttttgcagtttattaatatgctgaattacattgactgattttctaacattacagcaatccaacatctctgggataaaacctacttttcatattatattatcctttgtatatattgttctatttgattatatttgattcattaaatttttgattagaatttttctcctatgttcaccaggtatattggtatttaattttttttcttttgatgtctgtctttagttttggcattggcataatgctggcctcaaaagtaagttgggaagtattctctcttttacagtttctgaaagagttcataaataattattattttttccactaaatgtttgttagaatttaccaatgaagccatctgggcatggagttttctttagggaagtgttttaactacaaattaaatttatgtattagagatagagctatctatttgttctcaagtaagtttggtaatttgtgtctttccagaaatttttccgtttcatctaagttgtcaaatttataggtatgggccaggcatggtggctcacccctgtaatcccagcactttgggaggccgaggcaggcacatcacttgaggttgggtcttccagaccagcctggccaacatggcgaaaccccatctctactagaaatgcaaaaattagccaggtgtggtgatacacccctgtaatcccagctactttggagactgagacattagaatcacttgaaccctggaggtggaggttgcagtgagccgagattgtgccattgcactccaacctgggcaacagagtgagactgtctcaaaaaaacaaaacaaaacaaacaaaaaaacttataggtatgaagttcataatatcccactagcatcctttcaatatttgttgaatctgtagacatgtgatttttctcatatataatattcattacttgtctcttttctctttttattgatcagtctgattggaggtttattgacgttattcatttcaaagaaccagttttcaatttcattgattttctctattgtttttcaatttccatttatattaatttattgttttgtcttccttattttcttttttctgtttactttggctttaatttgctcttttttcccctagtttctagggagtaagctgagatcattgatttaagacctgtctttttctttgctatgtttccccttaagtgatttagtgacatcccacaaatcttgatatgttgtgctttcattatttagttcaaaatacttctatattacttttggattccttctttgacccatgggttttagaagtatgtttttagtttccaaatatttggggattttaaagaaatctttctgctattgatttctaatttaactccactgtggttagaggatagagtttctattatttggatccttttaaaattattgagactgatttgatagccagtatattgtctttcctgctagatatttcaagtatacttgaaaaggatccattatctgctgttgtgtggaatgtttcataaatgtgaattaggtcattttagttgagtgttgattgcgccttctgtatcctttatgattatttggtctactttttctatcaattatttagagaggagtattaaaatactcatccttaattgtgagtttgtttgttctcctttcagttttaccagttattgcttaatatatttggaagctttatttcaaggggcataaatgcttaggatttttatgttctcttgatttattaaccctctatcattaggacttaaattaggatttgtccctggtatttttttctgctctgaaatatagtttatctgggattactgcagccattctatatttattttgacttgtgttagtataataccttttttcactgtcttacttttaacatacttgtttctttatgtttaaagtatatttcctggaggcagcacttatttaggtcttgctattttatccattataacagtcttcaccttttaattgaggaattttagataatttatactgaatgtaatcatcaatattgttaggttcaaggctgtcttcttgccattttgtatttgtttcatttcctttgattccttttttctcttttaaaacctcttatgggtgaattgcgaattttttatgattctattttaacttttattggcttatgagctataactcttttaaaaaagtttagtagttgcttaggatttatagtatacatctttaattcaccaccatctacttttaagtgatattatactacaccacatatatttcagtataagtatcttacaatagtatccctccgtgttaccctcccgactcaatgtaattgttataataaatgttactttcatatgtgttatatacacaaaaatacatagttattatgtttattaaaacagtcagttatcttttaaagagatttaagtaataagaaaataatcttaaatacttttctctgccgttatcatttcaggtgctatttatatttttggtgcgaagatccgtagtttgatctggtatcatttctcttctgcttgaaagacttcctttgacatttcttatagtacagttctgctggtggtgaatgcttgccgcttttgtatgtctgaaaatgacttcatttcactttcatttttggaagatatttttactaggtacagaattctaggttaacagtatttcctttcagtactttaaaaatgttgccttactatcttcctcctcatattattactgataagcatctgatattgtccttacttttgtttttctgtatataacatgctctttatctctggtttcttttaatgtttcttctttttctctggttttgatcaatttgattatcatgtaccttggcatggttttcttcttgtttttatttttgtgtgtgtgcctgcactttgttgagcttcttggacttgtgtacttataattttcatcaaaactttaatccattattactgcaaaatgtgaaaaaaatcttttatattttctaatatttttctgcctccatatcctcttacttgagattttgagttacgcagatactaggtttttgtgaagttatcccacacgtcactgatgttctttttctcttattttttctattttattttgtgtaatttttattgttatgtgttcagattcagtgatattttgtttgtcgatgtctaatctgccaactattctgtccagtgtttttttttttaatttcatacattgtagttttgatttctagaagtttttgagttttttcgttaaatcttcaatgtctctacttatattttgaatgtaaaaaaagtagttataataactgtttagggtaattatctgctaattctaattctgttttagttctgggtcagcactctgctcagcattgtcatgggggaccctctggaagtgaccacatttttctctctctgtgcagttttcttctctctagtagtctttcctgcaaactctaactgccttgctcttccattctcttgggtccatatccttaacacatggagtccactgggttctgcatgcttcctctccccacctgcactgtgtcatggaaattctctaaaggcagagatttagttcagtcataaaactcaccttgtttcctgtcttgaaggatcgctattcttcattgcctattttccagtgtcttgcaaactattttttcataggtttttcctagtctttttggttatttcaggtcagagggtaaatccaatccctgttactccatcttggttaattataggcatcatctttattatcttatttaattctcagaaaactcctggtattgtggagcacattttcaatggggcaagacagatgaccagataattattacatttataatttgatgaatttgttagatactatgtagagtaatacaatcatgtaaggcaaaaagagggagaaggagtggattctactttacatagggtgcccatgagaaatctgttgggagaaggaatggattccactttacatagggtgcccatgagaaatctatttgatgaggtaacatttgaacagggacttgaagaagtgaggaagtgaggatgctgtgcatatttctggaggaagagcattccagttgaaggagagaacaggtgtgaagtctctgagtgggagtctgtggctaggctttaggaatggcacagaggccagtgtggctggagcagagtgagtgatggagagagtggtgggagaggggttagaggcatggcaggaggccaggtcatgtagaacttttctggcctttgtaagacacgattcttattctgagtgaagttggaagcaagaggagggttttgagcaaaagatgggcaatatatatatatatttttttgaaactataccctggtagctgccttaagagtaagtgaggtggtgaggagggtagggatgaaataaactatttatcaggctattgtgattatctaggaaaggaagggtggtggtttggactatggggtagtatggaggaggtaagaagtagttggattctgaatatatttggggtggggagccgataagatttgctgttggattagatgtggattatgagaaaagagaaacatcaagtatgattctagagttttcatttgtttgtttgtttttagcttcaggaactgaaaagagaagacatttcttgagatgaggagattgaatatttcaggggtaagatcaggaatttggtttgaatctgttaattttgagatacctattagaccattacacagagatggtatgtagacactagacatgtggctctatgagtctggagttcagagggagggtaaagctgttgatatgaatctgggaaccatctgcatataggggatattgaacctcatgtgactggatgagaccacagaggggttgcattactaaaaatgcgaagaggcccaaaccctggcacctctggggcatgtgaagccagagaaaggaggagaaactcaccatggatgctgaccaggagcagcctgaggtggaggaggaggacaggtgttgtgggggggtcccagaagccaagtgaagaaaccatttcaaagggaaggagaggtcaatgatgtctggtgatgctgccaggagggtgcgtgacctagaaggggaatgccgggaaaggtgggaggacagaaccctcaagaactccaacttctattataccatcctacagataagaaaacagtttgatgtcacataattagtaagtggcagaatcaggacttgagatctgagtgacttcgaatttaagaactccatacccgatgccacacggctccccccttatcttccctctcactcccagcactggttgaatgctgaataagttatggaatcccagcaatatctgaatttttcataacttagaaacagtaatatagtttgtattatggaaagtcctactatgaaacttttgttaatttattgcagttgtccctccttatctgcggttttactttttatggtttcagtcacccactgtcaactgaggttcaaaagtattaagtggaaaattccataaataaataatttatacgtttttcaatcgcatgctcttctgcatagtgtgatgaaagctctcgctgtactgctttgtcccacccaggatatgaatcatccctttatccagggtctccacactgtatgcaccacccacccattagtcacctactactaggttatcagatagaaaaaactatagtatatatagggtttggtactatctgcagtttcaggcatccactggggatcttgaaatgcattccccgaggataagagggagctgcttgattagatttgtaccctttatgttattttgcacattagtgccttatttttaaaatctattatggcaaacgtgaaagaaccttgcaaaagcccacacaaacaagcttatgtatgtcccatgaggaataccagaaggaaacaaaccctatttactggaaatgcacttctatatgttaatcacaatagatctattcttctttctcagccgtaaaggaacctatgagatttaacatttatggttgcagatatatgaggtcatcgttgttctgcagtatcattctttagccctttgaaaagccctgtggagacggtgtttgcagctgcacagatgatgggttttgggagcaggaccgaggaagaagtgacataccattgtgctttagatcacagtctttgggaacacaccatggatatgattctggctgcaatactgaccacttctgtgactgttttatttccttccttgagccatattttcatcatttactcagtagactttgtgatagttacctcctaggacagtcatgaagattaaatgagctaacatataggaagtggcctaacacagtgtcaggcagacagcaagcacgcttaaaagatagctcttcttctttgggaggccaaggcgggcagatcacgaggtcaggagattgagaccatcctggctaacacggtgaaaccccgtctctactaaaaatacaaaaacaattagccgggcatggtggcgggcacctgtagtcccagctactcgggaggctgaggtgggagaatggcgtgaacccatgaggcagagcttggcagtaagccaagatcatgccactgcactccagcctgggcgacagagcgagactctgtctcaaaataaataaataaataaataaataaataaataaaataaaataaaataaatgaataaataaataaaagatagctcttctttgtaacaagtgactcacatcctgtgggaaagtttgcctttgtactttagtaaataaaaacacactgacttgaggaattaattcctcttgttacttgttatgaatccgcgtcgcagcatttatagttctgttctgggcctgctgcgaccctagttcttcctgaagtctcatgcatcctttaagacagttcaaattactgcctcctccactttttgcaatacttattaatgtcttccatggtctttccttctttccacactgcatataacttactctgtgattcttcagtgatccttatctttttccttcatggcctctctccctcccatgatatgtaactcttgacaagctattgttcattcgtcatacatgtactgaacacctgtgaagcaccagggatgctcataagaatttgaaagatgagtccctcaccctcagagagcttagagtgtcatggatgagaaacatgtgtccatggatcactaaattacagctcagccaaggctgtgggagccactccagatcctctacagttcaagttccaactccctgtagacagacaacctgccattgctatggaatcagactccatgtttttagatatgaatcaattgttcccaacaagtgtattgccgttttgcagagttttgacagaaaaatgcttgggaaagggagtgctgacacttagggagttttaaaaatagctttaattaccatatgcagcaaatgtatttgaaaactaaaggttggtgtctacctttccgcattcctatccatctgtcttccagcaaatggattctggtggattcagatgaacttgctgcttgtgccagaaaggccctattatctgtgccttctaccctgttattacacctccttcgccagtctggataatcattatgcaccacacagaggagaagcaagcgcgcctgcacgcacatgtacacacacacattcacacgtggctgctgccttcacacagcatgggaaattacaggcccctggtggagctccccaggaagggtcctttcaaagctggaacagagaagcagaggcaggagatagttcaaaccaccagaacctctttctgtgagtgtcttaagggatgtttgagggtttacagagactgtagtctcagctttcattctctttcctactgcctcaaaccaggggatgctacatacattgaggcagctgtctcttagaggtggctggagaatcccaaatgaatattatgcagttttggaaaggaaagtgaggaggcagtttaactgccagtgattggaactaggatgcagtttccagcagccctagaggccagcttgtcagctactgaggcaatgaggggctgaaccttctgggtactttcacgcctgatactcctcttactcaagaattgctgaaaagcccactgtgtgaggcccatggggatctgaacaagtgcctccccatgtttaggtttctgcttgctgtgggcatggcaagaatagcaagccgaggggttgccctcagaagcaagggaagacacattgctgagtgcctactgtgtgccaggccctgctttggatgctttatagatattatcttaaaacaaattaaatttacccaattaaagggatggcaagaaacttgatctcagttataataggattgcttcctttctgccctcctgaaggatatgcaaaggttcctggattttacactaacaagatcaatcatagaaagatgtctgtagactcagcagtcccactactgggtatacatccaatggaaatgaaatcagtgtatcaaagggatatctgcactctcatgtggattgcagcgctattcacaatagcaagatatggaatcaacctaagtgtccatcagtagttgaatggatacagaaaatgtggtctatctacacaaaggaattctattcagccttaaaaaggaaggaaatcttgttattgacaacatggatgagcctggaggacactatgttaagtcaaataagctaggcgtagaaagacaaatatggcatgacctcacttatacacttctgtgttacagaattatgcttctgtcaaccatgaaccctatgtacaacagcagtcccataagattttagtggagctgagaaattcctgtcacctaatggctttgtagccatcctaatgtcatagtgcagtacattactccaatgttcatggtgatgctggtataaacaaacctactgtgctgccagtcatgtaaagaaagtagagtacatacaattaggtgcagtccataatacttgagaataataataggcgactatactattggtttatatatttactatggtatttttttattgttattttagagtgtacctcttctagttacaaagaagaaagttaactgtaaaacagcctgaggcagatctttcaggagatattccagaataaagcattgtcatcataaaagatgacagctccatgcatgctattgcccctgaagaccttctagtgagacaagatgtggaggtggaagagagtgatattgttgatcctgaccctgtgtaggcctaagtgtcttagtttttaacaaaaaagttttaaagaaattttaaaaatagaaaaaagcttatagaataagtatataaagaaaacaatattttgtatagctatacattgtgtttgtgttgtaaactaagtgttactataggagtcaaaaagttaaaatagttaagtttataaagtaaaaaagttataataagttaaagttaatttatttttgaagaaaaattttaaaaataaattttagtgttgcctatgtttagtgttcatagcctctatagtagtgtacagtaatgtcctgagccttcacagttactcaacactcacccactaactcacccagagcaacttcctgttctgcaagctccattcatcgtaagtgtcctatacagttgtacaattttttatctttcatagcatatttttactataccttttctatgtctagctatattcagatacacaaataccattgggttacagttgcctgcaatagtcagtacggtaacatgctgtataggtttgtagcctaagaacagtaggctatgccatatagcctaggtgtgcagttggctgttccatctaggtctgtgtaagtaccctctatgatgttctcacaatgacacaatcatctaacaacacatttctcagaacatatccctgtcattaagcaatgtgtgactgcatgtggaatccaaaaaagttgaacttatagaagcagagagaagaagggtgagatgccgtgggccagagtgacagtggggggttggggagatggtggtccaaggaatcaaaatttcagttagaaagaattaccagttcaggggatctattgtacagtatggttacgatagctgacaagaatgtattgaatatttgaagaatgctaagaaagattttaaatgttctcatcacaaaaaaattgataatggatcaattaattagcttgatttaaccaatccacaatgtatacatatatcaaaatgtcatgttgtacatcataaatatataacattttatttgtcaccatcatcatcatcataaaaagaaagacttctgtaggcactcaataacattaactccaagccactttgggcctcaggcatgatgatatgttttccgagcatgagagaccccatgcctatggccaagccttcctgaggggccagtgtattggggatgggttaatccaaggcttctcctctggttccctccccatcttccctggaggtttcctggctcaggccattttacctatccccattctccaagccacagagaacttcccagccaaccattatgacagtttgcctattttttgaaagaaaatatcttgggagaaagaagagcataaactttctagggcataagtgctgcttaccactgtgtaggtgtgtctgggtgtgtgtataatgaagtgggaggggcagggatagaagcaaagcagagaaaaattgctctaattccttctgctccttctataataataaaataaaatacaaattaatataccaataaattatcctttcaaacagccttatatacgtcatttattttgcctcattgagattttactgttatgttcagttttgtgtctcactgttttcaattaataatatatcattaacaatttatcatgtcagtaaatagcatttgaaataatatttaatgaccttctagtattctgtcattggaggaatcataatttatgcaaatcttctcctttgttggaaacttagcttggttaatgctattgtaaattatgctgcaatcaacatccttatacctagatctcttgatgtctccttctgatgataatattactatttcaaagtatggaaactcaaagagtctgaactgcttttatcatagtgcctgtctcatcttactcttgcatcttgtgacatgaatataataaattgttatttgtttttaccaatattttagataaaaaggtgcactgcattgtttaatttgtatttctttgcttattagccaagtcaaacacttttaatatttcttgattgatcatcacgtctacttctattttgtgacatggttgcctatgtcctttgcacagatgtgttagttttatatagctttatccacacaacaaccttataagagagagattattaaaaatccagtagaggtgatgaagttgaagttcagaaaaggtctgaggtatcacaacaatataaagacaagctggaattttaagctcaagttggtctgattccaaaccctgtgttaccttcatgcagtactgcctttgaaccagcccagctctaacttaatggaagatacatgttgatttttgtccttaaagggtcaaaatttccgcatcaagccaagtaaaagttctgattattatattgggtagatcattttaatagctgaatcaaaacttggctttgcaacttaaagtgacagaacttcctgttaactagaaatagacagaaaagccacgaaacttcatccgacagatgaaattcttatccaatagaagtgaatgaatgaacagattcaaagagccagtggaagacaatgtaaagtagcttttatgatttactgcaaagaatcctgcttgtttaaagtcctggctgtcttatgttgaactttcaatggccccaccaagaagacttgcagtgaggggcaggcactctcctcacccttgtgggagtgacaacatgtccatgttcgtttttcccccagagagatgtttctcactaaatcctctttcccataattttgactcttgtggcccttttatatcctccttgtggctgagcatttttggagtcaagaaactgattctcattttcctcggatcatctgcatctgggtcaggtacttcactatggaatttcatatcattaagactatgtgcctcaaagaaaattttcaatttagcttaatggttcagtttaatatgaaaagccatttcttccacccaaatattggctgcaggaagatgggttctgttaaccattaggtttttgtccctcagctcacaccacacagtactgggagagatgtgtaccccagatgagaagcagtcatagccaggaaccacaagaactgggaaatgtggtgatggcttgtggatgaaatgtggacagacagttaataatggggcagtggcttagagtccaaggtgataacatatgagcatgggtgggaggatattctgtggcatctgctcccacaaggacttggcttgtcttctgattgagctgaggagacactagagcattttgtattgagaaatgatgtgatgtgaattatgtttttgaaggaccaccctgacatccgtgttgaagatatatcatgggggttgggatgagaaggggtaggaaaaaggaaaaaaggtggagcctttattagagatgatgggatgtggaccaggatggttcaaatggaggtggtgagatggattcaggctcaggagtttcaaaggtggggctaacaggagctgctgagagttgattaaactgatgtcagggaggaccaacggttagtgcaaaaacaagcaccttcaagtagcaagtgttgaaaggagatgaaggttataggttctgtgcagggtgagttatattttacaatatatatatatatatatatattttttttttttttttgagagtcccagtttgttgaaggctgtggtgcagtgacacaatcttggttcactgcaacctccagctctcaggttcaagcgattctcctgcctcagcctcccaaatagctgggattacaggtgcacaccaccatgccgggctaatttttgtatttttagtagagacggggtttcaccatgctggcaaggctggtcttgaactcttgacctcaagtgatctgcctattttggcctcccaaagttctgggattacaggcttgagctaccgcacccggccaagttctgttttgtttggagtgctctagatctgagcaaaagtagtctgattccaatgcctacactgctgttattttataaacttttaaaagtacaattgacacttaaaaaacctgcacaatctgataagtacgacttggagttttgaaatatacatttgtaaaatcatcaccacaatcatgataatgcatctttgcataacccacaaaaatttcctcctgccccatataatttctacctctacctaatctcaagacaacctctgatctcctttctgtcactgtagattacatttcctagaattttatatcaatggaatcatacctgtattatactctttttttgtggagcttatttcactcagcatattgattttgagacacacgcatgttgttgtgtatattggcggttaatttttgcatatgatatgaggtaagggttaagattaatccttattttatttttttatatagttatttaatttttccagcaccagccattgaaaatatcctttctactttggatcttttgtcaaaaatcaattgcccttcagtatgtgtatctattcttggactttcttttctgtttcattgaccattgactggtggaaggattgtctattgtcccagcagtgccacactatctcaataactgtagcattacagttaactttgaaatcaagaggagaaagttctgtaccttgtcctgtttttgaaatgtcgttttcacctttctaggttcttcacattttcacaggtgtgggactagggtgagacaagtgaggcactcaggacacaaaatttaagaggaattcactctgaagtttgtgatagtgccttaccctagttgaggccctgcatttccatacgcattttagaattaacttgtcagtttctagaaaaatcctgctaggatttaatttcaattgtgttgaattggcatcttaacaatattgtcttctaattcatgaacaaagcatatcttttcatttatttaggtctttcttaattatttttagcaatgttttacactgttaagtgtacaggtcttgttgttaaattagtctccaaatatctaataagtttcctataattgtaaatggtgtttcttttttcatttagatttgcaattgtttgttactagcatgtagcaatacaactggtttctggatattgaccttgtgttcctaatcttgctaaattcacttcttagttctggtaggtttttgttttagatttcctgggatttttcgatatagactatcatgccatccctgaatatagtgaactattcttattcctttccaatctggatctctctcacttatttttctagccctggtgccctgactagaacctccagcacaatgttgagtagaagtaatagtagcggatatctatgcctttttcctgctcttaggggaaaaaattcagccttttatcattaatgatgatgttagatgtaggttgattgttgatatcctttatcatgttgaagaagttttcttttattcctagtttgctgagagtttttaacataattggatcttgaattttgccaaatattttttgtgcatctattgagataatcacgttttgtcttttttattctgttagggtggagaactaaattgattcactttcaagtgtaaaaccaacctgcagtcctgggatgaatatttttgtcttttttcaagaaaatgttggattcaaaattaaaatattttagctaaagtattggctaagatattttaaagaaattttaaatctgtaaattttgtatctatgcccagagatacaaaaattggcttcagtttcttatcctgtaaaccctttgtctggttttgttatcagggtagtgatggcctcctgacatgagttgcaatatgtttcctcctcttcaattttctgaaagtgtttgtgtaaaattggtattctttcttccataaatgcatgtagaattcaccaatgacgttatctgggtctgaaaaggttcctctgaatacccttcatggaaagattttaagaacacattctatttttttagcagatctaggactatttagattatctttttttcctgaagatttttttttttaccttttatttttctaaaaacgtctttgctttagttttgcatgtataaaaatctaggaaaaacatagttttctttttttttcttttcatacttaaaagatgtatcacggacttcaggcttgccttgatgaggactcagctcttaatcttagttttatttctccctgcatatcggatcttcttcttctagctgcttttaggattttttctttgcctctctttggttatgtgcttaattatgtgtgttcttcatcaaacttggaaactttttggcaattattttctcaagtacttttttctgtatccccttctctctcttctccctcatggacttgaatgacttgtatattaggctgcttgaaattattctattctcactaatgctctgttgatctttttcctgtttttttttttgttttttttttatctccatgattcattttgagtagtttctgttgccatactttcaagttcatcgacttttcttctacagtgtctaatgtgctgttaattttatccagtgtatttttcatctcaggcattacatattctatttgttaaatccaatttgtgccttttatttttctccctatcatgcatgttttgctctatcttctttacatatggtatatgtttataatatttataatatctattttaatgtcctgttttcctaattaccatctaccatctgcattatttctgggtgtgtttctattgattgattgaggattgattgaggatattgacatatcctcattatggattgtattttcttacttctttatgtgcctgataatttttgattagatgccagacattatgcttttacatggttgggtgcttgattcattgttagtcctttaaagactttctccctccttgggacacagctgaattactttgaatattttgatgtttcaagacttgctttggagctttgttatgcagatctctttagtctgttgctaatttggcctatttctaaggattgctgcacctgctcctttcagatggtcctttccctggattcagggggtttagttatgtatgtctagttatgcctgttatccaatgtctgaaaacttgttgcatatattttgtttgtttttagttgtttaacatgacaggtaaattcagcccttattaatccaccacagccagcatttgcactcttaattatcatgctatatttccttctgaatgtatgttttttatctttacacttgggtctacaaaattgggtcttgttcagatgtaaggattggatatgttaaatacagggctataaactccagaatcatgacacttaagggctctgggccatgcaattttatttctaaatcatctttggaaagttttttgtggtaattttttaggattttaaattatatatgcaattaaaattataattctctgtcagctcctcagggataaaaaaaatgaggtgttaatgtgaaacataaggtctcattttcctagtggtagggatagttgtgcacaaacagaagtggatttaaatattctcctgagataaacaaataggtattgcaaacaaaataattaaagtggtttgcaacaggcaagcaaatgaggactgtgaaggatcagctgttattatatttatttttctgtttgaatatctgcctggggagtaaactgtgaattaaagggctcagccagcttttaataatttaacaacagaatgaaaagaattggctttgtgttatggagatagctactcaggtcatagtttaaaatattaaaaattttgaggttcactttttgtgtatgtgtgtgtaattctaaataactcattttctcccctctccctttttctttctctcttccttcttctctcccttgctcctttgctctttcctccttcccttcccttcttccttcatgagtacttaccaggcctggtgctcagagctaggaagatagcacaacaggagacatttacctcaccgtggaagagctggttctggttctaactccagcatagacagagcaatggattatcacttacaatttccttttggttttggaggcacagtgagaatttacagtagtcctgaactaaatgaaaattgtgggtatatacagtgaatgaccaaaagatccttatgaattttagatctgagttaatggagtttctttatgcatttcttaaaacccattttctttttttaaattgacacaataattgtacatatttatgggtggtacaatgtggtattttcatgcacatatacgttgtataatgatcaaatcagggtaatgagcatatccatcatgtcatacatttgtaatttccttgtggtgagaacattcagaaacctctcttctagctattatgaaatatacagtatattattgttaactatagtttgcccgatggtcaatagattaccagaatttatttctcctaacatcagtaatcatcagagaattgcaaatcaaaaccacaatggctcactagatagaaggaataagttctagtgtcctgcagcgctgtaggatgactatagctaacaataatatactatatcatttcagatagctaataggaagatattgaacattcccaagacaaataaatgataaactttgaggtgatggctatgctaatcaccctgatctgatcactatgcattgtatgaattgaagcatcattatatacccccgaatatgtgcattatgtgtcaatttaaaaaagagaacacaatgagatgacacctcactcattatcaaaatgactattataaaaaatataaaagataaaaagtattgatgaggatgcggagaaaagggaatcttaacacactgttggtgagaatgtaaattagtacaatcattatggaaaacagtatagaggtttctcaaaaaattaaaatataactaccctatgaaccagcaatcccacttctgggtatctatccaaaagaaaggaaatcaacatctccaaagtacctgaactctcatgtttattgcagcactattgacaatagccaagctatggaaacaacctaagtgtccatcaacagatgaatggataaagaaaatgtagtataaaaccaaaagagaatactattcagccataagaaagagtgaaattctgtcatttgagacaatatttatgaacctgggagacattatgttaagtaaaattagccaggcacagaaagaccattactgcataatctcactcaagtggaatctaaaaaatattgatctcgtagaagtagagagtagaacagtggttaccagaatcttgggaggagaggggtaaggggagattggagagaagttggtgaatgttacaaaattgaaactccttttctgggcctatttccacattgctctgttgggtgcaggggattgcagaaaggggcatgtctctgcctgtgactgctgaaacccgttacctggataacttcccactcagcctctgccttgattgttgaactgcaaacactctagatttgccgtccctccaaatgccaggcaaagctgttttaacttgtcccaacagttattccagtgcttttaaaatccaagtagacctgcagaagtttacatttcagatgcaacttagagcatatttcaggaatatcacatctgaaaaagtcagagtaaggttagcaattgataaaccacttttgggaattgctttgacctaccctgaatgttctgagtccattggaattaaaggaaattgaatgagcagggatgggtgaaatggagttttgagaatttagaatttgctaggtagaattttctatggcagaagcaggaagctcagagaagatgaaggaaaaagagggaaaagaaaaagagagagggaggaagagtgagagacaaaggaaatagtaaaaacaaaaggaaagcagaaagtaaaagtaggtgacaagaaaaaagggatgaggagagaactgaggagaagatggataaatctcacagacagcccacctaaacacgtccatcacctataaataaccaaccagccagaggagctcgagtcactgtcctcagtgtaggtccctagtctcattggcagggagatgtccaccttgtgcttatggttaaatatgattgaacaaaatagagtaaaatgtgaagaaatacaagttgattgataaaatggggtaagcttctcaaaatgtaaagttcttaggactttggacttctctggctggtataccaggttctccttgtaaaccagtagatctgggaagggtttgccagaactgagcagagagcctgttcctccacgtgctagtctttagggagaggagactgctgcagattgctgtctgtgctgactgggcccacgcttgggaatgggctgtgatggaggaggtggatgagaggcagctctgctagctgaatgctgggcagccagagtatgagggcaggcagagtgctggctctacagtgagcagaagctattgcgtcatttatacaaacaaaggaagctgaactacttttcaaacaatggctcatttatttcataacagaattgttgagtcctgttttgatgtcctggcaaggggtcaagggtacctaagatttcctggaggtgaggaacagtaaagagctaattgaaaattgggatggtctgctatgggcttccttaagggtgtagaagaggctgtaggaggaatgggatgatgggaagggcagaaaaagggctgctctggcttgcatggaggccaggtagaggcaggtctttgatgggcatcaaaggttgtagaaagacgtttagtttttaagttagatggataaggaggactcactgcaaaacttcgggctagacacattgtatcctattgaattaaagccactgaactttgtcaaaaccctaggaagtactattattccatttataaatgatgctcaaagaaattaagtgccttgtccaagttacaccatcaggaagagaagaaggcggggttggaagtcaaatccatctgatttcagaccctacgctcatcacttctctgcataatatcttagaccagggcttctcaaacattaatgtgcccataagtcacctggggatcttgttaaaatgcagattctgatgagataggtttagggtggggcctgagactttgcatttctgacaagctctgagatgatgctgatactgttggcccatggatctcactttaggaaacaaaagaaccctctttggcaagttgctgtggcctgtgcaaaccagggagactcatgcataccccataagtttttagggggcagctaatgagatgatgtgcctctggtcaggatgactactcagaagatgccccttcttccactgtcctctgtcctggagatgtaatcagtgccaagctttgtctcccaccctctcttcctactcaggatgtcctgatctccatggagccttggtctgccttgccctaggtggtctatagggacctgaatgcaacacacattctgaaaaccctgttgacttcagtgggagttattctgtcatcacgtctttattgaattcttttattttctcaacttttcttaagctggccttgcctgaagtttctctactgtcatcaacttagattactgacaccatggtttggaagaggaaaataaactttattatttctccagaaatggagtaatgctggtatcacacagatgtttgatagatctaggtcttcctaaggaataaaaggaaatgactaataatgtgattgcatagccctgtataagtttagagatttatataaatgtttaataatatttttctctgatatcggaactttccaaaattttactgaagttttgcagatcagacaaaaacttatctgtgcatgagttttgcacctggtttgccaaaatatatattttgaaaaaaagagatccttactattttatttgtggctttgaaaatttcccttcattataaaaatttatcctctttgtccctcaacctggcttgaagtgagacctttgcagttactctttctctgttttcaatgaaatatttctaagaagcttaaaagatacagagagtaatataacaaacacccacatgtccatcattgaaattttgccatatttgagatctcgtatttggagaaattggctgttttggatacagtgaaaatctgccctgtaccccatttcaagtcccatgagagtgtgaatcagtaaggttgttttgactacagtaacagaaaaatatgagtcaaatttccttgaatggtctaaaaatttattacttcactttacaaatggttcagagacaattcataagatttcaaggtagggcaattcagaggctaagtggcatcttcgggttccctgatctttgcagtgtgatggactggccctcaagtggactctgctcaggactcaaacatccagaggcagaaaggtgctgtctcttctaggtcttcttcttaggattcagaaaaccatctaaaaaatccagcatggagaacccccttatgtctcaacaaccagaagtggggccatggctgtctcttaaaactgggacaacccaggtggtctgggaccaggcaggacacagctctgggtctgggaccaggcaggacacagctctggttctgggtatcctggaggggagagccccctggggttgccctagcatggaggaagtgggcaagagtctcaggcaggcaccagatctgctggttagcttcctcttttcccccagggacagctactgtcctgaagctgggtgtgtcctcatctaagtttttattatattatactatacatgtatctttactataaatgtatttatttatcactctgtaacttattcctcttttcctttcttttctgctttccttaactctgtcatccacatctgtgcaggtgacgaagtaacactgcagatgtattcagtcatctttctagctgcatggtagtccatcatattaattcaattacttcttctattatttctttttctgttattacatcagaggcctgaatggatgtgaggaagaaatagctgaatctgacagttagtgaaactcttgtgtctccaaattatcccattggtattatcatcatttttattgttctcataattagcaaaaaggagcactttagaaaccattactagcctccatatcagtaattcatcacatttttgttttgattaaaggcttctttgaaaatccaatatagtctatgggctttctccacaggaaaatgcacatacacactttacactttttggaatggcaagtcctcctgaagccagccatataccctggctgaatatacatgttcctctgaacaggggaaatcacatcttatccccttccttagtgcacactataaaaaggacagttttgcttcgaatcagtgaattaagcatgtaccttttgggaggatgtgaggattggcttttcttcagaattctaacttttctttggtcttaacactttgcaagtgaagtagagatttgcagaggtttcttaatttatttgattcaaaatgcagattttctaagattcagtgcattctcagtagagaattagagacagcgattctttttattatgtagtgcatgaagcaatttctcatattttagtgtattcacagaaatcttttattaagtatggtataaggcaataaaagagtctttttttttactttctgatgactggtaaaaaggatatgatgttaacttgaaactccatccctcatttcttctctacttgtttttgttgttacaatattctggtttttaaattgcaaatacttctcccattgaaaatggaggtagatccatcagtattttgccatcagtcaattccaatttcatcaacagttaatgccccaaattctaaattttacctagttctaaagatgaccatttgcagccaccttagcttaagttaccatcatctctcacagggctgatctctttaatgagcagtactgatgaaataggatttatgggtggaacctattagattgtaggagaggaagtaacagaaatttagggatatatttctgaagcaacaaacaaaataaggtggaagctgcagaatgtttacattctttcagtcacgataatgagatgattcaagaatacaattcagatttggccaaatggaggagagtgcacatgcttctcttgggcccctcagaaatagccctctttctaatattaatgacaagaaacttaagaagagacagccaaatgaaacaaatataaattatagcataataactgaggtttagtcagtcacaaagtcaaaacatatagggagctatttgggaggcaggtgtgtgtcccagaaaaagaccagggtcatgagctaaagaatttaaattccatacaaaaggtttagtagtatgtcttcatggaagaataattagcctgaatgacactcacaaaaggaaaaatgaccaaaaaagccagatataatacatttaaaaatacttaaaaatagagtccatcaagagtaacatctatgaaggccaaatgtaaagtggtaataggaactcccagcaatatgtgagcttcagatttaatttttgccttgcatgtatttgcccaactgtgaaaaccctgagattttttcttatgattgtgcaaggaataggacgtatgagataaagtctaagaactaaacaaatgtggagcctgatgagagatttctacataaagctggaaacttctatcttcagtgtaaggattatgagaaatgaacacactatgcagaaggagatggcaaggaaaatgttcagtcttgactggagttgcatggagcggggagttttcttcagaactgataactcccatgcaggtttgtgatcccagtttccactatttacggtgtctttaaaaagctgaaaggaaaacttaaatttgtagtggttatagatttgtagtggttatagataactagtgctcctagttaggtatttgaagtcagcataaatagtttttgaagtaatgtgaatcaaaggcttcataaggcagttttaaggaaaatgagattacgtacatgacggaaaaaaacaaggaagaaagagaagatgggagagagggagggaagaggagagagagagagagagacagagagagagagagagagacacagagagagagagagagacagagagagaaggacaaaggaaaacgaaggaaagaaaaaagtcaccatgagtgagaaccaagaaacaataaagtgcagtttaatcagatctgaaatgactttacgtatttagaagtatctgacgtagaatattaaataagtgtgcttaaatatgtttcaaaaatagatactggaaaatatgagcaaggaataaaaggcatttaaaaagcaaaatagaaaaggaaatgaacagaacatcagaaaattaagaatctaacagttgaagttaaaaatcttagaggttgaacaccaaagtggatacatacgcagaaagaattagtgaactggaaaatatgaagaaattgtttagaatgaggcctagagaaacaaagagatggaaaatatgaagaagttaacatacatggaaggtagaatgaaaacgtcctacatatttttattggacttctaaaacgaaatatgacataatggagaagaaaaaataataaacaatgttaaggcttctaatttctagaattattgaaagaaatcaaactccatactcaggaatcccaagaatcagaaacagagtaaaaattaaaagtccatatctgggtatagcataacatgctactgtagaacaccaaagacaagcaaaaacctaaaaaagcatccaaacagaaaaggcatatcatctacaagggaatgacagttaaaatgattttttaaaaaaatattattattattacactttaagttttagggtacatgtgcacaatgtgcacgtttgttacatatgtatacatgtgccatgttggtgtgctgcacccattaacttgtcatttaacattaggtgtgtctcctaatgctatcccttccccctcccccaaccccacaacagttccgggagtgtgatgttccccttcctgtgtccatgtgttctcattgttcaattcccatctatgagtgagaacatgcggtgtttggttttttgtccttgcgatagtttgctgagaatgatggtttccagtttcatccatgtccctacaaaggacatgaactcatcatttttatggctgcatagtattccatggtgtatatgtgccacattttcttaatccagtctatcattgttggacatttgggttggttccaagtctttgctattgtgaatagtgccaaaataaacatacgtgtgcatgtgtctttatagcagcatgatttataatcctttgggtatatatccagtaatgggatggctgggtcaaatggtatttctagatctagatccctgaggaatcgccacactgacttccacaatggttgaactagtttacagtcccaccaatggtgtaaaagtgttcctatttctccacatcctctccagcacctgtggttccctgactttttaatgatcaccattctaactggtgtgagatggtatctcattgtggttttgatttgcatttctctgatggccagtgatgatgagcatttttccatggttttttggctgcataaatgtcttcttttgagaagtgtctgttcatatcctttgcccactttttgatggggttgtttgtttttttcttgtaaatttgttggagttcttgtagattctggatagtagccctttgtcagatgagtagattgcaaaaattttctcccattctgtaggttgcctgttcactctgatggtagtttgttttgctgtgcagaagctctttagtttaattagatcccatttgtcaattttggcttttgttgccattgcttttggtgttttagacatgaagcacttgcccatgcctatgtcctgaatggtattgcctaggttttcttctagggtttttatggttttaggtctaacatttaagtctttaatccatcttgaattaatttttgtataaggtgtaaggaagggatctagtttcagctttctacatatggctagccagttttcccagcaccatttattaaatagggaatcctttccccattgcttgtttttgtcaggtttgtcaaagatcagctggttgtagatatgtggcattatttctgagggctctgttctgttccattgatcgctatctctgttttggtaccagtaccatgctgttttggtgactgtagccttgtagtatagttcgacgtcaggtagtgtgatgcctctggctttgttcttttggcttaggcttgacttggtgatgtgggctcttttttggttccatatgaactttaaagtagttttttccaattctgtgaagaaagtcattggtagcttgatggggatggcattgaatctataaattaccttgggcagtatggccattttcacgatattgattcttcctagccatgagcatggaatgttcttccatttctttgtatcctcttttatttcattgagcagtggtttgtagttctccttgaagaggtccctcacgtcccttgtaagttggattcctaggtattttattctctttgaagcagttctgaataggagttcactcatgatttggctctctgtttgtctgttattggtgtataagaatgcttgtgatttttgtacattgattttgtatcctgagactttgctgaagttgcttatcagcttaaggagattttgggcttagacagtggtgttttctagatatacaatcatgttatctgcaaacagggacaatttgacttactcttttcctaattgaataccctttatttccttctcctgcctaattgccctggccagaacttccaacactatgttgaataggagtggtgagagggggcatccctgtcttgtgccagttttcaaagggaatgcttccagtttttgcccattcagtatgatattggctgtgggtttgtcatagatagctcttattattttgagatatgtcccatcaatacctaatttattgagagtttttagcatgaagggttgttgaattttgtcaaaggccttttctgcatctattgagataatcatgtggtttttgtctttggttctgtttatattctggattacatttattgatttgcatatgttgaaccagccttgcatcccagggatgaagcccactggatcatggtggacaagctttttgatgtgctgctggattcagtttgccagtattttattgaggatttttgcatcaatgttcatcaaggatattggtctaaaattctcttttttggttgtgtctctgcccagctttggtatcaggatgatgctggcctcataaaatgagttagggaggattccctctttttctgttgattggaatagtttcagaaggaatggtaccagctcctccttgtacctgtggtggaattcggctgtgaatccatctggtcccggactttttttggttggtaagctattgattattgccacaatttcagagcctgttattggtctattcagagattcaacttcttcctggtttagtcttggaagggtgtatgtgttgaggaaattatccatttcttctagattttctagtttatttgcatagaggtgtttatagtattctctgatggtaatttgtatttctgtgggatcggtggtgatataccctttatcattttttattgcgtctatttgattcttctctcttttcttctttattagtcttgctagcggtctatcaattttgttgatcctttcaaaaaaccagctcctggattcattaattttttgaagggttttttgtgtctctatttccttcagttctgctctgatattagttatttcttgccttctgctagcttttgaatgtatttgctcttggttttctagttcttttaattgtgatgttagggtgtcaattttggatctttcctgctttctcttgtgggcatttagtgctataaatttccctctacacactgctttgaatgtgtcccagagattctcgtatgttttgtctttgttctcgttggtttcaaagaacatctttatttctgccttcctttcattatgtccccagtagtcattcaggagcaggttgttcagtttccatgtagttcagtggttttgagtgagtttcttaatcctgagttctagtttgattacactgtggtctgagagacagtttgttacaatttctgttcttttacatttgttgaggagtgctttacttccaactatgtggtcagttttggaataggtgtggtgtggtgctgaaaagaatgtatattctgttgatttggggtggagagttctgtagatgtctattaggtccacttggtgcagagctgagttcaattcctgggtatccttgttgactttctgtctcgttgatctgtctaatgttgacagtggggtgttaaagtctcccattattattgtgtgggagtctaagcctctttgtaggtcactcaggacttgctttatgaatctggatgctcctgtattgggtgcatatatatttaggatagttagctcttcttgttgaattgatccctttaccatcatgtaatggccttctttgtctcttttgatctttgttggtttaaagtctgttttatcagagactaggattgcaacccctgcctttttttgttttccatttgcttggtagatcttcctccatccctttattttgagcctatttgtgtctctgcacgtgagatgggtttcctgaatacagcacactgatgggtcttgactctttatccaatttgccagtctgtgtcttttaattggagcatttagtccatttacatttaaagttaatattgttatgtgtgaatttgatcctgtcattatgatgttagctggttattttgctcgttagttgatgcagtttattcctagccttgatggtctttacattttggcatgattttgcagtggctggtaccggttgttcctttccatgttcagtgcttccttcaggagctcttttagggcaggcctggtggtgacaaaatctctcagcatttgcttgtctgtaaagtattttatttctccttcacttatgaatcttagtttggctggatatgaaattctggattgaaaattcttttctttaagaatgttgaatattggcccccactctcttctggcttgtagagtttctgctgagagatctgctgttagtctgatgggcttccctttgtgggtaacccgacctttctctctggctgcccttaacattttttccttcatttcaactttggtgaatctgacaattatgtgtcttggagttgctcttcttgaggagtatctttgtggcgttctctgtatttcctgaatctgaatgttggcctgccttgctagattggggaagttctcctggataataccctgcagggtgttttccaacttggttccattctccccgtcactttcaggtacaccaatcagacgtagatttggtcttttcacatagtcccatatttcttggaggttttgttcctttctttttattcgtttttctctaaactcctcttctcgcttcatttcattcatttcgtcttccatcactgataccctttcttccagtcgattgcatcggctcctgaggcttctgcattcttcacgtagttctcaagccttggctttcagctccatcagctcctttaaggacttctgtgcattggttattctagttatccatttgtctaattttttttgaagtttctaacttctttgccattggtttgaatttcctcctatagctcggagtattttcatcgtctgaagccttcttctctcaactcgtcaaggtcattctccgttcagctttgttccgttgctggtgaggagctgcgttcctttggaggaggagaggtgctctgctttttagagtttccagtttttctgctctgttttttccccatctttgtggttttatctacttttggtctttgatgatggtgacgtacagatgggtttttggtgtggatgtccttttctttttgttagttttccttctaacagacaggacactcagctggaggtctgttggagtttgctagaggtccactccagaccctgtttgcctgggtgtcagcagcggtggctgcagaacagcggtggctgtagaacagtggattttggtgacccgcaaatgctgctgcctgattgttcctctggaagttttgtctcagaggagtacccagccctgtgaggtgtcagtctgcccctactggggggtgcctcccagttaggctgctcgggggtcagggacccacttgaggaggcagtctgcccgttctcagatctccagctgtgtgctgggagaaccactgctctcttcaaagctgtcaaacagggacatttaagtctgcagaggttactgctgtgtttttgtttgtctgtgccctgcccccagaggtggagcctacagaggcaggcaggcctccctgagctgtggtgggctccacccagttggagcttccctgctgctttgtttacctaagcaagcctgggcaatggcaggcgcccctcccccagccttactgccgccttgcagtttgatctcagactgctgtgctagcaatcagcgagactccgtgggcgtaggaccctccgagccaggtgcaggatataatctcctggtgtgcaattttttaagcccattggaaaagcgcagtattggggtgggtgtgacccgattttccaggtgccatctgtcacccctttctttgactaggaaagggaactccctgaccccttgcacttccgagtgaggcaatgcctcgccctccttcggctggcacacggtgcgctgcatccactgtcctgcacccactgtctggcactccctagtgagatgaacccggtaccccagatggaaatgcagaaatcacctgtcttctgtgtcactcacgctgggagctgtagaccggagctgttcctattcagccatcttggctccaccccaaaatgattcttaatatctggatgcagtgggctgaataatggactccaaagatatccaaggcctaatcctagaacctgttagtattaccttatatggcaaaggacattttgcagatatgatgaagttaatgatcttgagatggggcgattatcttgggttatctggataggtgttaaatgcaatcccagcatctttataagaggaacacaaagggaggtttgactgtatgaaagaagaagaggtgatgcaaccacagaggcagagcttggaatgatgcagctacaagccagggaatgctgacggccaccagaagctggaagaagtgagaaacatgtctcccccagggtctccaaaggagggcatcctggccaccaccgagatttcagcccagtgaaatggattttggtcttatggtctccagaaatatgatagaataaaactctgttattctgaagcactaagtttatgataatttgttaatgcagctgtgggaaacttacacactggacagcagtggaagctagaagtcagtgccatattactttccatgtctaagagaaaatagtagtcgacttagaattatatctttcaagagtgagataaaaataaaggcatttcccagcaaacaaaaactgagtttatcaccaacaaacccaaattaaaggaaattctcaatcatatacttcaggagaaggaagatgaccccagatataaggtctgaggtctctaaaagaagccttaccaataaactaatgaatattggttacatagataaatattggctgtatcaaacaatagaaataatgtgtaatgggaaaatacaaagaaagattgaattaaaatactggaggtttttagcgtgttagttgggataatggtgattggaagtaaacattaaagaagagagtaaaaatactgattaacttcacactttattagatatgcatattaaaatatctagcataaccaataaaagataacatagaaaacataactgccaagggtaggtaaataagtaaagataggaaacaaatcattttaaagggaaacaaacaaggaataaagagaaaactccaaaatgtataatataaataatgttatagaaatcaatccaaatatataaataatcataatgaatataaatggattgaaatttctactaaaaattcaaatatggatgtaaaatatctagtatattaggtttacaggcattccaactaaaatgtgagacagagaaagactgatggcaaagagatggaaaacgttagagcaggcagatgctaaccaaataaaactcatgtagctatattaatatcagacacaatagaccataaggcaagatgtgttactagaaataaatagggtatctatatgatggtaacatttaattcagcaagggctgtctttctatactgtgtgtaacgaataaaaaaaccccctggccaggcacgatagctgacacctgtaatcccagcactttgggaggccgaggcgagtggatcacctgaggtcgagttcaagaccagcctgaccaacatggtgaaaccccgtctctactaaaaatacaaacaaaataaaaataaaaatagccaggcgtagtggcatgcgactgtagtcccagctactcaggaggctgagacaggagaattgcttgaacccgggaggtggaggttgcagtgagccgagattgtgccactgcactccagcccaggagacagaacgagactctgtctcaaaataaataaataaatacataaaataaaataacataaccccaaaatatattaaaaatagccaatattcaaagagaaatacacagatttttaatggacctaaaaatgaccattgacaccaacaaatgaacagtgaatgcacatgaaacgttcatgtagtacaaactgaccacacggtaagctacaaagccagcctttccacaaagaaccaaagttagatgggtttgtagcctggttctaacaaacattcctgaacgtggagaagatacccgtagcaggtgacaaaggctttgtatctagaataaaaaaatatattcccacaaattaacatgcaagagaaccaactcagtggaaattggacaaaagcacaaatgcaggaaaggcaatacaaatgattcataagtgtataaaagatattcaaccttattaagaattagggaagtgaaaataaaatttaacaatgctccaatgcatacttaccagactgtcaaatattaggaagtcatacaatatcaggtgtaggcaaggaggtagagcaacagaaactcccttaccacatatgattataactttgtaaaaccactttataaaaaggaaaaatgaaaaaatagcaaaatatagaatataaataatatgacagaaatcaacccaaatatataaatttattttacactttacatatttgctgttacctagtaaatttgaatatgttcctattttctaatcaaggaactttaattctagatatatatcctaaagaaattcttactcaagcacaccaagacacatgcacaagacaatgtacatggaaactttgtaagggcaaacaaacaaaacagtcaaatggtaatcaacaatagggtgaataaattgtaatatagtcatacaatgtgattgtgcacagctttgaaaatgaataaactagagctgagctgcacctatcagccatgaatcaatcactaatgcttaatgttcaaccagtggttattaaatggtggtgagtattggaattatctggaaagctaatggggtacccagagacgttgcttgttgaagtgggacaggactggagttttgtaattttattaagttcccaagtggtactgatacacaacgaagtttgagaaacagcgtgttagaacacagttgcaagaggcatacacattgtttagcttacccaaagctaaacagaataaatgagactaaactgtatgttatttgggttacgctacactaatcagagcatgatgaaggctgcttctgtgaggaggaaggagtaagcttttgagaaggaggcatccaaccaagatgtgggtaatattttatttcttagcttgatgaaaggcgcactgaaatcattttattattcatatttaatgtatgtaatgtttgtacataagatatatttcacaatataaacttaaaaagtaataaaatacaaaaggcttattttgagcccgtgcactcagtgagcatctgtgtatgatgtgttacttttgtctgtgctgctgacttgctgacttctaatagtgttgtatatacattatcttgcttcttctgctcattggctgcactactggagggaatctttgcccaggacaaagggaaagtttgttttccaagaagccacttggattgccctctgcacacttaagaaggtcccgaggtcggggtgtctcatagtagtacagagactgacctgatgtgtgcagccaggaaatgcagcctggtgtgtgcagcctgacatcagtgagcagggagtggatgcatccctatactcacccctgtggcactacaagagacccaggaggaccaacaggacaagagcagggcctggcatgaaacttctagaactgactgatcacacaggtttgggacttacgcaaggagaaaagtgacctttttaattgaccccaaggaagtggggaagctgcttctgtggcttgttagattctgattgcaaatatctctggattgtacagtaagaataatcccacaagtgcaaggaggtgggtaggagtacattggcagccagcatacatgctctgacccagagcacatggatgaaaactggattaggggaaacaggaagttctgcaaggtacctgcagaccctcactgtgaggaagacatatggcagctaatgggttggaaagggagccttcaagaattcccaggtgggtagaatggaaaagaaacagtgcagactaagggagttgggggcaggggctgagcccacttgatgtggtggctgcccttggcccacttagccactcactccaggtgctgccccaggttgccagggaaagtgatggttgtgtttacagaaacgtactgtgcaactttgtaagtcaactccactacagatttccagggtcctgcttggggtgtagtggggagagctcagtgctgcagattctccctccagaaagttgaggaagcaggagaagtttaatcaaaggacttctaggaaaatggcctgttattcctacagtgccctcagccatcaagagaatatgggaaaaacgaaaggcatgagacacatccaattcctcttggaggtgtactggctctgattctctcttttgtgcataatttaaattagggtcttcatgacctccccaggtcctttatattctgtctttcaggtaaaactaactaacctactcattgctttttcttatattcttactttgtctcagattagaatgtgatttctcttattctgtatcctgtgttcggggcagggccttggtcaccaaggcagctaagagcagagctgagcatgcacatccaggctcagctgtgccctctgctcccctccctgaagcccagctgtgttctaggcccattccatctggtagtcctgagatatggacattgtcaatttccccacctttgactgtctgtcggttccaatctaataaaatcatcttcccttgaacagacttttgtctgaaatacagtttagtagtttaaacccaaatccaatatgtaatagcatttgagttcttttgaaatccctgtaattcagtatatttaggaaatattaattatcctaaaaggatacaatccttaatattttactttctcccagacccagcacccagtttcaactgaccaggcttcacacacatatcagcttcttaagacagtttctgaaatacattgtttaccatcttacccttaaaaatgttatgttcttgtttaaatgattttgaaaccctcatcactaattcccaacctcattagcttcctttttaccatcatattgtctcaaagctagaatgtgtcacatgcaaggagaaagatttaagacttatttcaaaatgtagctatttgtagttaaaattttgtcttgtaatttaccgctgacttagtcccttcttagaaagagtgaaccagagcttttcttaacctggctagccctctcttccatcactgaaattgttggcttatacaggctgacttatcctgacttagaatggtttgacttacaattttttgactttacaatggcatgaaaatgatacacattcagtagaatacccagtttagtacccataaaaccattctgtttttcactgtcagtacagcattcaagaaattctgtgagatattcaacactttattataaaataggctttctgttgggtgagtttgcccaactgtaggctaacgtgagcattctgagcaaggctaagctgcgatgttcgtcggctaggaggattaaatgcattttttatttatgatattttcaacgtatgatgggtttgtcaggatgtaagcccatcttaagttgaggggcgtctgtatgtgttagtttccatttttgttgtagttcccatgttgcacacagctacagagaagggtgctctcttctctgctctctcctcctccagttttgttcctctctaatcctctctccctaccgcagtcagagattttcaaaaatgtaaatctatggcttgtttgagcccagatcctttcaagagctccttgtctcccttaatattagcattttgtggggtgtactgaccctctgttctcccatctggccctgaatggggctctagccctgccactgaccactgttccttctgccccacaagcattccctgcaggggaccagttgctctgtccctccccaggtcatctaaggctttagcatttcacactccctgctgcctctaccctctacctggaacagggagctattggcagctccctccaccttccttccacagcaccaccaactcctcaactgcaactgtgccctgcctaccagcggcactttggctagcaagtttctcctccagaacttgttagccagaaacaaaatctgtattagtcagggttctctagagggataggactaataggatagaagtatatatgaaagggagtttattaaggagtattggctcacacgatcacaaggtgaagttccacaataggctgtctgcaaactgaggagccagtctgagtcccaaaacctcaaaagtagggaagccacagtgcagccttcagcctgtggccgaaggcctgagagcggctggaaaatcgctggtgtaagtacaagagtccaaaagctgaagaacttggagtctgatgttcacaggcaggaagcatccagcacgggagaaagatggaggttggaagactcagcaagtctgctctttccagcttcttctgcctgctttattctacctatgctggcagctgattagatgttgcccactgagattgagggcgggtctgcctctcccagaccactgactcaaatgttaaaatcctttggcaacaccctcacagacacacccaggaacaatactttgcatccttcaatccaatcaagttgatactcaatattaaccatcacaagtccaccccttgtcagattcctcatggaagccctgttctggaaagagctcctgtggtctcctccccctgctatttctatgctccacagtggatcataccaggatgggatgttgtgagcactaaataagctaatgtgagcaaagggctttttgtagtcaatatagacagcacataggtttccttagccctggaacttggcataatccatcctaggatgcccatgagatttatgggacaggatagggcctgatttttttctggctgtatccacagtgcttagtacagaacaaacttcagagatataggtagattttgtggaatgaatagtgaataaatgaatggatatattctcaaaattcgtgtgcaaatattttgtaaaatgaatgtaattctggaagaattcatggaaactcattgtatattgatcaactatggcagagaaacccagctttccttgtcagaatcaggtaggtgactcccaaaaggaaagttagcctttctgtcttgctaatgtctaccatgaccttttatggcattagttcctaaaagcttcacacctgtggaaaccagtgcaccagtggtttagtctcaaacgtctttttctagccttcagggaaaatgttgactaatcttgtttgcctctaagggatagcaagtattatttgtgaataagcaactaatgaactgtgtgacctgggcccaatcccttgccctctttggcatcagcttttcaggctgctggcctagatgcctcctgataggtctcttgcagagatagttcatgagtggatggtaagcatgggcctggttatttttctaggaaatcagtgacccggagatcctggatctggtccatagtgcccttggaaggatgaccgtggtccggcaaatctttccgtctgcaaaggacaatcagaaatgcacgaggaacaaccaccgcatctcctccctgctctgcgacccccaggaaggctacctccagatgctgcaggtcagtgctcagcctcttctctccagtcccctccaccaagagtctcacccacacccttggccaagggagacatgtgggggcctcctattgccaccaacttcaattactagagctctgtcatttgttgaaattgaaaccggttgactgggcagtgtctctgaacagcacgagcaggcaattatgcctgttgtcagcagacagggcttattggctcaccgggtgtctctggtatttaaaagtcacatgcatagagggtaaagagattcctgtctcttatgtctctgtgatgacttctttgtgggaatgtgttcatctggcagggctgggggtggagtcttctttgggaagtgatcattttgaacctgttttaggttcttgttaatatagacacgacccttgcaaagcaagatgggactatcccagcacattggctgagtgctgaggcttgggtcacccaggacactgttggatgctcagctgagcagggaggggcaggacagcaggaccataacatggaaccccacccgcatggttccttccaaggcccagaggtaccaagtgtttctggtcagtccttcaaccctaagtatgtgcagtcggcactagcttgtcttgggccttggaatacgatggagagctatgtgcctagtgtaagaggtggtttctctctgggtgtttgggagcaacagggaagtagtgtggagagtacccactggcagcctcaaatccacttctaggttaggaatgtggtgcctcagaaaactttcactgatgcttagtgagagcaccaggacagaaggaaatttcttccacttgggtttgtggaaattgcacagaagtttgtacatgtgatatgcttgccattcagcatttgaaactagttccaccatctttacccagccaggcatgagggttagaaattggggttgcagaacagagacggctgtatctgccacctgagtatcagccccaccccataacattttgctctcactgtatcaggggctgcacattttgtggaagggaatttgtggaatcttgagtagggtgtggacatgtgtcaaatttgccaaaggaatgaatctactctataatctcatatgtggagagaaaaaggaaacatgcctcaacggatggtaaacatgagaaatgttttcttggttgaggtggaaacacagcagacattgattttagctggaataatccccattccactagtgtctgtgctccagggagcccaccagagtgtctggggtctttctaaggcggtggaggggtggccaagagagtggacccaaggcccccgcatcactcatggactcaagagccctggacacccgagtcagagtgaaaggcaagagtttacgttgagatgctgctggtttattctgccttcctgtatgtggagtctggaagaaatggcgaaggccaagtaagttcctctcactgtgcctctgtagtcatgattcccagcctccatgtgggtggaaatggccttaaacaatggggctcagggagtgtgtgcccattcccacccagtgcagcgggagaggggaatccctttgctctctgtggggccagagcctgtgagggtctcactccctgcagggtctttctagcttctctctcctttgaagggcttcctccctccccaaatacatggcacccttgcctcatatgccctaaatcattctctaggtcttagttaaactgcactcagtctccttgaagaacaaagatggggccactttccatggcacagaagtgtctgcaaaggttagagcaggggaaagaagaaagtgcttcttgttgaggcctgtgatgcccccttttgctgtgggtgaaaggcgcaggtgggccctttggttgcatatcagacacattggatgcaaaaagtcttttcactggaggagagagaaagagagactgaggggttcaaaggggaatctagctgagggcctacttaaatgacacgtgcccatggagaggagaaacaaaggcacagctcccagatatgtggccggacatcatcaaatgaggtaaatgcagtgtcagatccaggaaccctgggacactatgcctccctctgttcctgctgagacccaggcattgcataaagagcaaagctgaagtgcaacactacaggaatcttgtagtaatagcagcaacagtaaaagaggaatcaagtcacctgggttcaaatcctgataactctagttactagccaattatttcattattattatttgtttatcattctgcgcctcagttccctcctctctaaattgggggttagaatattatcccccagagtcataattaaaattaaatcggagaacatacggaaagcattcagttcagagctggctattagcagtacagttgagtatctctaatatgaaaatccgaaatctgaagtactctgaaatctgaaatttttgagtgccaaaatgacactaaaaaaagtgcccattggggtatttcagattttgcatttttggattaaggatgctcaactggaattggaatataatgcaaatatttcaaaatctgaaaaaaaaaaatcccaaataaaaacacttcttgtcctaagcatttcagatatgggatacttaacctattatcatcattactgtggaggtggacaggtacattcagggtttccatggaaagggtgaacatagccttttttttttttttttttttggtgtgatttagtctacctatctccaagcatgctttttaaaggcatcactgcaggtgggagggcagtttctatctttccagccccttatcacaggctttgtgtaccacttactgtccacatctctcccatgggtactcaatcatagcttccttgcttgggagatgagaggctttgtattttaggctcatgtagttctttatacaaggccacaagaccctgctcattgaagacccttgataaggaattaaaggatgaatctattaagaatgcaggtctcagtacaagttaaactgaccctagatgcctctctctctctctctctctctctctctctctctccatatatatgtgtatatatatatatatatatatatatatatatatgtatatatgtaaaacactttattaaaggaatctctgtctccatttgttgcatctgcttccttgcaaggcggtatcatgagaggaaaatgtggatttatgtattcatcctgcccaacaactacttgggcagctggtagattcatctcatttacaagccattcccttccagtttcctccatagctattaccacttctttctttcttaatgacagtgtggaaggcaaactaatttctactagcctctagctgtgagatttatcgagaagactctaacatgtttagaacaactcaaggaaaaaaaaaattatgtcatggattattaactttgtcttgatgaaattagtgaagatccttttggaaatggagctctccagtccatctttcttcccccccaccaaatggctgctcttgggaagatcattctggtttagaagtttctgggaggaccaagaagaacagggaatttttgcaagagtatccatcccttagcttctctattgagctggcctcagaaactctgtcatcctctatgaggcttgtggtcagggctttctgtgctctaaagccaaccaagaactattatagcaaatcagtttggttcctatttagcagaaggaaagtccctgggaagaaaaatacctaaatatgtgacccctagtgctccaaaagctttgcatttgccagcatgcagcactgttgtttatttttccccacaaagcactgtcttatttgtgtgtttttgattcttgtttccttgacaagttagtttaggacttgtctgactcagccagtaataaaagtgataaccagtccctcagaaccctgagactttgctaagatttcacagacatctttgctcagaggagaatctgtaacgtactctgtctctggaactgtactgccctgtgacatcagggctgcaattgaagtaagaggcgtattgtcacatagccatccccccatttatattcaaatgtgtttctaaggggtgacaggcaaatgatgtaaactgtgttgtgtggtcactgtggagccggatccctgaattaagctttgggggctaatgtggtattaccataaaatgctccctcaggttgaaatttctcttctttgtgcattttaaaattgtcgaatggcttgattgaatcattcctcctctgtgctgcacacactctattagaggatttcaacccctctccctctaacatccctattttttagggttttctgtactcttccatggctaaaaggtttttgtcaacctgttggtagaagcttgtcctctggagcttcactgagcctccccataccagctaccttggatttcatgtcactttcaatggtttacttagccctaaaaacccatatgggagcatttaacatggagagtggggaaggctttgtcggagacaattgcgcaagtgttctccttggctgcaactggctgctattctggctgcaggcagccatgtgtgcatttggagcccaggaagccttgggtgtggacagatagccctcttcactttcacaccgtcgcctcagattcagcagtgagtggagctccctgcatccactgtgccctctcttaccatctgcttcctcctgaggcttggctgtggtgccctctcccaggacagctggactggcagcagtttggcagagactacacctggcatggatttctcaagctgtgacatctgggtgtcaacttgtcctccccgctgatccctctgtcagctgcttgtctaactttgccggccaaccacaacctgtctgaggatttggtcagaggtcagttcctactgtttgcctctgtgatgtctcactgaactgtccactttgcttgattaatgacagagggaagagaaagctgggttcttcagaagcctggaggaaatgcagcctttcttaatgaaaacattttccacacttccagctttggtgttgggaggataatggtctggttctgaccctggcctgtgattcatcttccttctcctccaagaatgatttttaccttgataatgcggatgcacaacaattccctgggccccagagcataacaaatactaggctggaataccctaataaaacgtgactgaagtctcagacttactacagagaaggcatgtgctgctgccaggaaggcagatagcctggccacccggcaggcacaccctcctgtcctccaggggcctctcccccactgataggggcagaggtcttagctggatcgacctggcagcctgcagcactcctgaggagctcaacacacttcatggggggtttatatgcttattatctctggtcctgatcctgctcccagggactcaataactgaccagaacacctgggcttccaatgtgcctgcctctaccctgcccagtgcttgcccaggtggaaagtcagtgccttcctggtttcaacaagacaacaaattcccttctgcacaagacatccactatggtctggatgtttgtatccctccaaaatttccatgtcgaaacctaatccccaaggtgacagtattaggaggtgggacctttgggaggtgatgagggggggagccctcataaatgggattcgtgcccatataaggagctgaagagaccagacttctcctcttccactctgccagggcaagatgagaaagcaccacttatgagccaaaaagcacgtcctcaccagacacagaatctgtaggcaccttgatcttgtacttgccaggcttcagaacggtgagaagttaaatttttgttgcttataagccacccagtctgtgtttttttgttacagtgacctgagtggactaaggcagccttcgcgtctcctcaggagcctcagagcccagagccggtgttgtacgcgatggggagttgggtggggcatttgcattgtagctgctcaagcaggattcagcctttgaagcccctccccgctggggaatgtgcagtgtttctgagcactgcttccctgcccccagtgctccattatctcctcatcttgcttgcttccctgccctccctccatttcctccctctgggtcttggttccttattttctcatgaagatcaatttaaagtctcactggtggcctttgctcctgctgccacaaggtattttcctaaataaaatatagtcactgatgtaatagaaattctggtaataactttttaaaaaatctatttttccatccctggtcctcagtcaacttcttgtgactcatctctaattatccagcagccgagagtgtccatctgggtctctcaagagctgcaagcccccaacaagagctcacggctgagttctctcctgcttcccagagacgcctcctacctttcccattatctttctgaggacccacctcctgcatgggcaactgatgttggaaatttataccttgccaggatcctgctatctcagggaaatgcatagcctgggattctggtgggagatggccaattctacatttattcacacagagctcccatctctttccccagcagcctctatccaccaccacttgtcttctaagaagaggcatcttttttgcaaatgccttgacatctctttaactttatgtttctaagaacatgtttaaaactgttattcaactttcagtaattgcataaatacccatttatgcatttgttatgcatttcttcttatgttagacctttcataaatgttccttcctaattcttataaacctctcaaaattaggaattttaatttccatgttgtagcaggtcctgattagggaaactggcatgtgcacaggctcagaggcctgagagagcaggggaagagttcactgtgcctggggcaaggggtgagaggcaagaagttgggaagtaacttggaggggacaacagcaactggggctctgcccttggtgatgtgatgtggaagacgtgtatctgagaaaggcaactctgtgcagtgtggaaagggaggatctgaggctggagacaggttaaccagtggttaccatctccctaggtaaaaataagggcacctgaactccacccccaaaatgggaggtgaccattgagtcctcactcaattgagtcctcatctggaagcttctccaggactgaaacccctgagctggtcagagggtggagtgcagagcacatgccttccatggatgctggactgcagctggcctttgttccagccataccctgcctgccttccccacctcccctgcacacctcgctgatctcattgcagaatccactgtgccaaaggctcccgtggctgagccagccttgctatgtgaatgtctggcctttgactgcagcaggccacactgtctccctctcaggaaccagagtcagggtattataaagcttccccctccaccctccaccacacaacacacactctctgagccttcctgtgtttgtaccttttatgaaacatcctaggggcagagaagtggcctttcccttaaagggcagccctgcaacacctcagatcatgtagccctgaaaggtgtggctcagaccctgggggctgtggcagctgtggctgtgctgctggggcctggaggaggccagggacatgtacacgggtgctcaggtgagcagatttcaggtgggactgggaattaatattcagtgctgattcttgcttgatctctgaccctcaagctataggagtcagacatgatccctttgtgcctttggaaggctttagggacccaaggggctttgtgggagagaacgagtggtgttggaggatacaaatgcattttcacagtagtcctcatgttctgcatccagactggtgctgaccccagcttctggggacatccctggaggagctctcagctcatacatattgaaatctggaagctgcatagatattttatttgcctcttctattcatttctgtctctgctccctctaaagatgaagatgcatgcaaagatcttagaatagtacttggcacacaggggtattaccatctgcattccacaggtgggtaaatcagggctgccacattgtacctctccaggggcccagatcacactgtattttattgttatcaagataagtctcagagtgttcaacagcttgttcaacatcactcagcaaatggatgctagtggagatctacttcactcgttccatcaacatttattgagtgcttgctgtatccacgcactactgtggagacctggggtccagcagtgagcaaagctggtccaggctggaatgaatccaaagctgttgctgttcctattagaccacttgcctaagctgcaaccctagtgtgagagtcgtactgtatggtaattagtgagagaaacttgccgaaaatctctggagtggctaaatgaaaccatccagtccctcttccagctctctcctcacttacaatagagcccatgagctgccaggaaggcctcaagcccttttcctggcttctgtctggccttgacttcactccctctagcatctctgacctggctccaggtattttgctttgcagccaggtctctcctctgccatgcccatggccttgacactctgacctctcttttgcttctcaaatttactcttacctggaatgcttttttggttcctggaattttatgctgcagtgttcctaggtcacccagagccctgggctcctgcttgcatggggatgagtgtttaaatagtgacagcatctgcttgcttgccttacctttgctaatggactctgtactgtgcataacctacaatatgagggagggaggcaaggacttctccaagccgggcctcattctctgcacctgtggcctgtgactccagcctgggctgttggcccctggtggtcaatgacgagtgagcatccatgcatctgggagcctctctccttccagacttccttctcaggggcttggcatgaccaaccctgacactgatatccagccatcttccctgaggaaaggcttcttttatgtttatcaggctctggagagggccccaagcataaactgcctttctaccatctacttgtgatttttttcatccaagaatcccttctctgaataggttgtgaggttagggcctttcctaccctccgcatccccaccagtgaactgtcagctaaagtcagtttgcacaaagtaggtcgtctcagtgaggatgctgaggttggagagaagatgggggagccacagattattactgcagtgttagattatgcccaaggcagggagagacaatatcttaccagggaagagttaggagtaagtggagtagatggaaacagctccatgggaagatcaagaagatgttttgaggaggttttagacaagaacaaattgctgtttgaacaaaggaggctctgtccaaagtcaaagttggagggataaaatctcttttatctgctatccattttctataatttctcttttttgtaaaacatggttagtgtatgccttctgagaaaatccatccatccatcaatcactccatgcatccatccatccatccatccgtccatccatccatccatccatccatcacttcatcactccatccacccatccatccatccatccatccctccatccattacttcatccatccatccatttacctatacatctacacactcatctatccttccatttgtgcatacatgtgtctaccatgtgttcggccatgaaacatacattaagcaccagctatgtgctttgattggtgctgagttctagagatagtacttaaagagctcaaagtttgctgagataaacacattcatgagctggcaacatatataatggaagaggggtacatctagggtgatatgtgggcattgggaaggcctgcctatctatgcctggaaaagagcattgctcaagcctgttcccatgaactgggatgtattcacccttccaagcagacatacttgtgggaagactgagggcttcctttggcctttctgagtcatgtcctgctttttcctctttgttcaagacctctctgcattcatacatttgttgagtaccttaattgattgtgaatagaagtgctgaagtgaaagggagattccactgggttctggtcagagccacagatgcgctggtgctgtggactctgccctgatgtgtgagtgtgtggatgggtgggagtaggggtcaaagagacctggctggttaaatagcatcagctatcagttggtggctggtagacccatgaatgtcttgagaagagaaatcttcccatcgttaaggattctcagcttcaagttattctcttgggaaaagaaagaaaaaaacaacaaaccaattctaaatggcttgtattccttataacaacatctccatcatgggtttgttttccagaggggaggaagacttatcaacacatgcagtggtgggggctcctgagggctggggagttgacagcaacaaagagtgaattagtcctgctcattgaggaaatgctcctctaggcctcaagtggctgagggcacagttctgtcatggtgttccctgtgcagtgagggggtgagctcccagtgggtggtggtacttagttttccctctgctgtcaagtaagctcttgtgtgctgcaggcccctgaagaaggtcagaccaggcactgaccttctactccccctcagctcaaggctcttgctttagcacactcttgacacctctgcaacatctggccatcctccacctacctgttacacctacagaatgcagaggccctaggcatacagcccacaatggtcagagctgggggacaggacagtggcagacaggacagagctcttcagcaatggtctgtgcacaaggatacctacaggggaggcagtcagctctgcctggatgtgacatgctgggaatggcccttgagggctggacaggcatgacggggcagatgtttgtgatgccttgcacctcctattggctcatctcagacttcagcttcagttgctggagagttcgcgccacctaacttctgatctaaggttctgcttttggagcacctggactaagaaacatgaggaagtaaattgcaggcagagaacaaggcacagaggtgttgtggtacagggacatattgaggagagtaggggtgaggctgggggaggaggggttctttttgcagcccaaggagcctatttgatcttcccaggagtcctgtgaggctgacatgatctcctatttttatctggtgattttgtttttctaaaatatttttagcagacgacttgctgcttaggcgttcagagaatggtccccttgacccactttggctgagggttgtttgtgcaacagttatcagtggggggccacaaacctgactgagggtggacgctacctcgccctcaccgccttcccttctcctcctcttctcctttgtgctccaatgtccccatggagggctggggtggtgtgaaggtgacatccgagaacagagctgtccttctcccccattgggctcccgctgggcccctgggagggtgggtgccattttctagctcctccacatccagatcggggtctatagccacactcaggaggctgagcctggcctgcccaccctggaccccacacatgggttgggccccaatgctgtagtgtcgttcttcacacttctaccctagattctcagtcatggccttgccctccagagcactgagacagggatgtgtctcctctaccactgagctcacatcagacaactaagcagaagggtggtcctcagatgggcacagttgcaaatcccaaatgtgttccctgggtggcagtgactccactgcagagcaggcaccagaatcctcatctcttgttaccaccgtcctcactgttacctcgtcactcaggccaccattcaccctaggcgtgtccggcgaccagagtggtctttctgaggcccagatctgatctccagcttcctgtacactgacccaacaaaggcgtccttctccctacagtcacctctgttgctagtcctccttagtaagtccctaagtctttgcagggctcaatccctgcttctctcttgatcctgctccctctgtattgtacccattgacacagtcgtcttgaactgctttcagttcctttaacccaaggatccgccagcggtggccaatagagcaaatccagtatattgcctcttttggaaaataatgttttattgcacatggcagcacccatatgtttatatattgtctatggctgctttcaagttataacagtagggttgagcagttgcaaaagagactactaagcccaaaatctttatgagctggtcctttacaaaaaactctggtggactgtgctgtacctggccctgtctcttgacaccttcatgcccttgcaaatgctgtgccctccctttatcctactaatccttcaacgctgagctttctgcttatccttccctccatcctcccttacctgagtaggtaacttacctgtgtgcacatctcaatcagctacagataagggttctccttgttgatgtacacatgcacatcccactctagttcctgaggcagggcaaggtcttattccattcaggactctagaagctggctgggtttttgaaagtacacctaaaagccgaggatcttggcatagatactgggcaccacagcttaatgttggcatcctgcattcctcctcctttctgtgggtttctccaaagctctctagaaatgcacctgtggaaagggtttcactgcctctgtctttgcagatctccaacctctatctgtatgacagtgttctgatgctggccaacgcctttcacaggaagctggaggaccggaagtggcatagcatggcgagcctcaactgcatacggaaatccactaagccatggaatggtgggaggtccatgctggataccatcaaaaaggtacgtgtgagggggcacccccaacctggccaaagacaggccccttcttatacctccactgtgttcccctctagtagctggcctgaagctaggctctgtgtggctgccccagtaggcccctccccattcctctctccttgtcactcttcctgtcccagcatctgcaggccaggtgagctgtggtccatgaatacatactatcattactgtcttcaatttaatataagaacttctgagaggttaagcaacttgcccttggctgcaagtaggtatgaaatggaggcagctgcctatcccgtgtctgcaaggtacccctctatgcagaacaccactccccaagaaacgagtgcacctgtatgtgcgcttgtgatgtatctcatgtgctgaggagggatactgaattagaaagctggatttgaagtgaattgagtaatctatggatgatttgttagagtgaattcacctttagaggcttcaaaagagcatttagggaaatccatagcgttaggaatttagtcacaatgaattgcatgtggtttcagtagcagggaacatgctttagtgtaggtgagaatctactacagcccagggcagagccagggccccttctgggccaggtgtttctgggactctgtagggtcacagggactatgagagataaatcttgatgagaatctcaccctgggcttggagagagaaaggggctcaccacggctccctcagcctcctgctgcctccttctcctatgaagcccactgagccagtagagagaggcatggagaccacagccagtctatgctggatgctgtgctttgtacatattttctcctttagtctttgtgggttctatgatgtggagttaattaacttcaggccaaagctgggagatgggcaatgtgcccaaggtggcacaggtggcaaagccaggatccaagctagggatcttgctgtgccctccaatgcacatgtttgctgccctgcaacttaccatcatgtgtctgatatgtctcctgttgacctttgaattttctcttgggttaggctaaggtgagcccctggaactgattgcaaggggaggactaagcttcaagagggcaggaacaaaagctaccaatgtttaatctcatggctagcatggtgcctggcacatagcagggactctaagcatatagatggtatgaatgacaggtgcaagccttagggatttctcccataagcaaatatcctagaaagtactgatcctgctctgagggcctaggaccactagcccatcttgtcctcattacagcctgtccatggtctcaaaactgattgctccgttcttggtgaccacttccttgctcctcttagcctttgggactccatcctctaccttaaccagattttccaatgggtttttctcctcttctgcagggccacatcactggcctcactggggtgatggagtttcgggaggacagttcgaatccctatgtccagtttgaaatccttggcactacctatagtgagacttttggcaaagacatgcgcaaggtaagcctcaggctccctgtcttccaatcttcctgctatggtgccaccaaagacagcaacagctacagggtccctgagctcccagcaactgttaactagcacagatatcctccctcctagtctctctctgctgatgctaccattggctggtgtttatagggcatgctagggagtaggtgcagagaggtttccaaacagaaattgcctctaatggagtctctttgagtagagcaggggtacctggtaacaactgggtcctactgcttggatcagggggctgcatggaggctataaaggacaatgtgttttctcagagcagtgaaatcagcccgaccacagggacaagtgtgaattgtggttgaggcaggaggcagaggttacagcctgagtgtcctccagatccaggagtgagacaaggccacaaacagaaaatggagctgcaaggagggtggaaattggaaaatgccagaggccagcggaaagataaatgagagacagaggagttgaacaactcagactgaggtttggcttttttatttggtgctggtgctggtgcaggtggcagcctgggtcttcccagtgatacttttcctcttcttccacctcttatgggtgatagagaacagttttcaggactgtggatagtggagagtggccttttatccagggtggggatccccaaagttaagtggactcatgacacaaagagtctaacagggctaggacaaagaggccgacatggcaagtaagggcttagaacaattatccaagtgaaggaccttggatgtggtcactgtgagccaatgtggagctgatggtgggtatcctggtgtggtcagtggctggctgtcctgggccagcccaactctactggcttggatgcacttccagaaatagcctgtacaggagaggccagagatgggactactcatggtgtagatgggccacagtggcttggtcttctccggaaataatgaaagcattgactgattggcatgtactcaggcacagcctcatgtattcacagacatgctcacacacacacacgtacacacttcacacacttcgaaggaagatgtctctactaatgatggtgcctggagcatgaaggacagtcctcgcaagtaataagctctcagcaggggctggataagccctcagcaaagagccctctagcctgatgtcaccattggctagaagcagtggagggagaggcaagggctaaatgatgttggggtactgagaatctgggtgggggaattctttggttttgctcctgagggccagggtagaaagatgcatgtgtggactggtggagggtgtgagagctggggaacagggagggagccgtgtagagctcatcagtgacagatggggcagaagacaagctccccagggagagactgggatggcctgggtccatgtgtgatgtgggggatggtgcgggggatttttagcccactctgatggaggagagagtcatggattggtcatataaataattgaagtttcaataatttgttgtgacacaatatctgacatacatggcttgatggcattttggagctcagaggtttgttggtggcatcctagagggagtcggctagcaactattctgtgacttcccatgtagggccagggtgtgacctgcaatgtccaggaagccagggctggcctatgatgtctgttaggaatgcccaaagctgtgagacttggtgaggggatgggcatgagtggtcagcattggtctgggtcatgaccacaagagatatgggcttgcattgggactcccaccaggtaaggagggctctttcaatcactctggtgtgaaaaagcttgccaagtgtagctggctgccaaaataactgttcacatcgaccacggtcctggcgcacttgccttcatccccaagtcttattttgaagttaggtcctgcctgccagctccttccgtctcccacctacttcttttggtgggaatgctggctgtggaggtccctgccttgtctcaagcagctgaccctccagtcctgtgcctggcgccaggctggccacctcaggtgcctgagagagggggaggcactatgtcctccacttcctgtttcaggtgtctggaccttccacgttgccaaggcaatgcgcctcaaaaaccctgaagccagtgggagctggcatctctcaatataagaagctttgagcaggaggcctgaatgtaattgagttggaagggaagctgattttcaagtcggctttattttaaaatgtatctttttgtcattttaaaatctgcccttaataactgcatatcctggttgttatctgtctgcctagcagcttatcgctgctaaggggaagttatctggaaagcagggagtgggatttactgtagcaaatgtttgtgattcaggcctagggtgcattaaagcaagtccagggagtttcagatgaaccaaggagaagggattaggaccgtatcatgggggtagggcagcatttggaggcagagctgagtggtagtttcgggtgggagacggggctgtgaagggtggggctgggaaatcggggtaacttaaaaataaaggacattcacataagggagaaaaaaattgaggatgggtggcaaatttgagggtagggtcctgagccacaccaaaacagtgccaagatcagtcatctaaggagtgcccaaggtcagagtccaaggagtcgcagctctcttggccatgcaaggtacacagctgctagaggagccgactgggcagactcctagatcctgtgatgctgggcaggggcagcattccctgcaaagattatatatgtcatatatgaacaaaaccagacacagacaaaacagtttctttcagacttaaaccaagaggaatcatttaaattaagtagcaagatattttcttaaataccctggagggaaatctcagggatggtgagtcacccagacattttagattaagtggcatcaagagactgtagattactcagccccttcattggagggaaggagtgggtgatcgcctttcaactgcagggtgctggacaaatactaattcaattatctcatccaggaagtgcgtttttagtgagtgagctttgtatggaaaaatcaaaggtctatatcatcagcttgctgtgtaactacaagcaaaatattaattgtctgttttgtacttggagctgtctggcatgggtctgccaccaggggaaaggtttgctggaaactcttccagctctcacaggcattggcctgacatttgtcttgggggtggggggtggtatatgcttcttttatcctgttggtgtcatgtttttttcagggctcagaactgtaacaggacctccacaaatttctacttggctttgtttctctttgttcagacaggaatctccaaaagaggattccatgaacgtgtccatgtaaatgtccttagctcatgattgagctctgacagatctgtcagggccacctgtagttaagtttccaaaggtggtgtgtgtgggaagctgctgggtgtagggagcgggcaggaactgttaagcatccacagtatccaaaagtgcattgtacgtatgttgtctcattgacctgggcctttgctttgctcctggctctgcctctcctgagtttttgcacaacttcccttttctgaacctttgtttcttcagaggaaagttacaggtaatatgagcctaattgttggatggaggggtcagtcagtgtaatgacactgtgcagcacttggcagtgagagcatgctcatatggcacagggcatcagctttgggcaaatgggactgtgtgttttctctgagcgtatctatctcagactccacaagagcagagaggcacaggaaggcctaaaacacagcctccagcctgacagtgccctagactatagctccaaagccaaggccagagatgggaggctccctcttgcagccttgagctggtgcagctgggatcactcagccctgtgtgccagggcagtgccaaactccccttctatgcctggcagcagatgtccactccatataaagaccaagggctgagagggatctgtggaacttcacctctgataagattttattttcagggctgttttggtgttggtgtaatcattgcaagaagaaaaacatggttgtcttttttttcctccacaagcatgacttgcctggataggagcactagttatagcccagaggaaacatttctccatgacctgattgctgaagctgttcgcctttctccatcctaatggcactggtgtaggcaactcattctcttccactatctccgggtcccttgtgcaggaaaaccctgggagaattgccaactgctcgcaggccctttgaacctcattttccgtgggtggcatccacccgattcagtggctcagtggagggcagcagctgtccttgggcaggagggtgggggaggtagacaggagcatctgggcagcctgtggctttgttttatgccttgcatcctggatgagggagaccctgatgtggtgtgagacaacacagctgttttcttctcctttctagaatcaagttaggaccaagagaggctgaaggagtattttgtccagggggtcaagctttactctggccctacaaagtctggtcaagcaggatcttgctgggacccaaatgtattaaacagtcatagaagcacatgtgctggttgcaataggtggggaattggggtctgcacagctaagtttaggaaacagaggcccagagactggggagatgcatagcaccagcaagcatgatgctgtgctgggcttggaaggcagatttcctgggagtgagggggcttggcagaggacccagaacatcatttctgaacttgaggcgatgcagttctgtgactccctgtctcctcttcagctcactttctgctccaaccttccccagccagcattagggcatcacagtcccttcctgttggctgggagcctgctgaattgaaatttccaccactgcccttggctcagcctccctgttccagcgatttcccagggaaatggaagggcctcattctcctttactagtttaagacgcttcttctaacttctctgtcaattttgattcttcataaaagctggctttggatgggaatcaaatgccccccttgatgttgcatccctgggagagccttgtgtctgctgataattcactgagtaataactgctctttgtgcagggattgccacgccataggaccccagtcctccctgagcttgaaagtgcatcattaacatcctcgtgcagatctgctatgcagtgttacaaattgccccaaattctcgggttcagaagttgtaagaggtgaagccaggttgaaaaggctaactcgtaatgaagtagaagctacctttacctggtggctccagcagttggtgctaggagcctgggaagtgggcacagcagtgaggagggggatatgggtggaggtggggctgggaggatctagtctgaggactgtgcagtgtctctattaagctgctcccatagagacttccagctgtgcacagtgagtcgcagaagagaaataaacttgagtctcttcatggattaacattcttccagtgtattttcaaagtaaaatgtcaaccgttctgaacccttgtgcagaactatttttgacagagccgagaactgaaacaaacactgctgcttcatcccagtaaaggaataaggaaaagatgcaatcaagtatttcattttaggtagtgtttttatcaatacatacccattaagggtagaatgttcaggaaacacagataaatgaaaagaagaacgtaaaagtcagctacaatctttaaaccaagaattaaatactgttaatgtttctgttgtattttcttgttgtttcttctcccttcatacatagagatcatgatatgtatatttatcaaattgctctttattgtaatacattttatatcctgaccttcctactaaatgttatattgggaatatctcctcatttctttaactatgctttacaactatgattttttcagtggaaatacattactcaacttacaggcagccatcatttatttcatcttcctatctgatgaatatttaggtattttcaccacattattatagaatagtgctgtcataaacatctaaaatacatacaattttaattatatctatatttatttccatactatattttttaagaagtagaattaccagaacaagaataataattcttttaggctcctgatgtacatgatacatattttcaaattgattatagaaaggcctaataactttcacatccatgagtagtatataaagtctatgttatatcacatgctaaaaaatatggttgatatatattaaacatttttgctagtttggcagcaagatgaaaaagtgatatactaaatttgcatttcttgtgagattgtacattttaaagtataattattggtcatttgtatttcacatttttgtaaattatacctcaggttctttgcacattgtaaacttatataacctctctttcagaaaggaattgatagttatttgtgttcaatattttgttccaataaatagtttgcctttgaatttaaaaatattttcacatacagacattaaaaaatatatgtggtcaaataattagattattcatttgcattttcttatatttgtgttttttaggaacttatacccaattcacaaagtagatactgtttactcatactttcttccagttatttttgtggcttgatttttttttttcaacaaaatctaccatctaactgggatggatttgggataaattgtgacatgatggcctagcttttacatttttccactaaatgctttctactaccatttatacagcagaccttcatttccctattgacttgaatatcacattttattataagctatataaatttgcatatctcctcattgatttttagaaattattaatcatttttcttttttctctgagctttaatttaattcacatttgtacattttcagaatgtggtggcttcagataacagaatgtccaccttaagtggattaaacaataaggaagacttactatttcacattaaagaggactgcaactaggaaggcttcagggttggccaattcagacactcctgctgagcccaaaggcccaggtctttttcatatctcaacttggctattctcagggcatagtcttaatttttctcataatttcagaatgactatggcagttcaaactgtcatacccagaaagatagcagtaagtagaagaagagtatcttttctgtgtgtctccattctgtaagtgaagagccctttcctagaaattggtcctggcttactgtgttattttatatcattttgtttttttgttatagcaggtgagggtttcctgctagatgcgtaggtaacattggcagaatttctctctcagatgcttgtgttcagcttgtgttaggcttgtgctcttttcataacatgggaaagaaattgctcattcttttgtacttgcataggcagagctcttgaacgctggaaagaatttgactgtacaattttctgggctagctgctggttttggagatattacttttgtatcttggaaactttatttcctggtttctacatttcatttaatcatttttagcaatctgcttcactgaaaatcttgcagttcactggaattttcaaattcattacttacagctctatatagtacttgtaaacaatttaaaaaatactgagctgttgacatatctccctcttcattcctattattacatatttgtgttgtcttgctttattttttgattagacttgacagcagttttttctattgattttttttcaaagaactaggtctaatttgtttaatcatgttttgtattttttttctgtctgcctgctgcataataattgttttattcttatttatttattacttttcgagacacagtctcactctgttgcccaggctggagtgcagtggcacaatcatggctcactgcaacctctgcctcctgtgttcaagtgattcttgtgccgcaggcccacgagtagctgggactataggcacatgccactatgcctggctgattttagtagagatggagtttcaccatcctggtgacgctgatttcaaactcctagcctcaagtgatctgccccctcagtctcccaaagtactgggattataggtgtgagctactgcacctggccaattttattgctattttaaaaaactttttatatgaggtggtagattttatttttattctttcttgttttggaatgccttgttttattctgaatatagttgtgactgaattcttagtggttttactaatataaactgaagtgtaacccttatacagaaaaatttctaaatcttacgtgaatcacagtgaattttcaaaagtgaacatgtacatacagacaacactcacatcaaagaacatcaccagcaccctcagagctctcccctgtgcacccctttcatcaccacacccaccaaatggaaccagttttgatatctaatgcccttaattaggtttttcctgtttttaacttgatatcagtgatatcaaatgttccatactcttttgtatcgtacttcttttgctcaacattatgttagtaagattcatcattattgttgtatgtagttttagataattcattattgggttttacaaggaaagttttattatcatacaggtatagagaggccaacaaatcaggggacgactgccattgaaaagataggttgttacagttccccagaggggcatgcgaagcacactagacagggccacagggtcagtcaggaggtggaggaaaacctgagcaagcttcatacttatttttcaagacagacttggtgattcttgactctttgtattttcttatacattttaaaattagatttttattttccacaaaaaaatttgggattttgactgagattgccttgactcttgatcaatttgggaagtgttaatgtcttaccaatattgagtaacctaattcatgaatatagtatacccctcaatttatttatggcttcttcaatttctctcagtaaagttttgtagctttcactgtagagatttgaataacttttgtttgatttattcctggatattgatttattattatatgtagtaaatttcaaattgatttttctacttgttactgtgtgtatatagaaatagaattgggtttgcatatcaaacttatttctagtgaactaactgtatttgctagtttagattattttagattttctgtatacacaatcatgtcatctatgactaataaaacttctatatttgcatttctaattgttttttttttatttctttctcctgtcttgttgcattagttagggtctttagttcaagttaaatagatgtaataacagtggacatctttattttgttcttgatatcagaagataatttataataatttattctttaatatgtttactacataattttggttgatgttcttttttcagattaagacaattcccttgaattcctagtctactaatagtgttatcaagaatgagtgttacatttatttaaaggctattttgcatctatcaagataattatataatttttattcttgctctttcctgttaatatgataaattatgttgatgtattcctttttgttggtgctcatttctctttattgcaccaataccataccatgctgttattattattttatagtatattccaatatttgctaagtttgataccatctaatttctcttccttttcagaatattttataattaaatttttattttgagttggtatagatttacatgcagttttaataaatagtatagagagatccagcataccctttatttagtttccccaatgataacatcttgcgatactgttatgcaataacacaataaggatactgacattgatacaagctatggatctcattcagatccacattttcccagtttcatttgtgtgtgtgtgtgtgtgtgtgtgtgtgtgtgtgtgtgtgtgtgtgtatttagttgtattcagtattttcctgtctgagctgatatatcccctaccacatccaacacacagaatagttttgttaccaagaagattccttccccattttctcttttatgaccacatggacctaactcatacctccctgcccttcttgttcctacctcctgataaccataatattttctattctacatttctaaaattttgtcatttaaaaaatattatatatgttgaatcacacagtattataatttttattggctttttctaactctagaaaaaaatggcacaattttctagaggttccatccaagttgttgcatgtgtcaagagtttctctcttttatagttgagtattatttcgaagaatggatgcctcactatttgtttaaccattcacccactgaagaacatctgaattatttgcagttagggcagttatgaataaagccactatgagcatttgtgtacaggttttctgggataaatgcccaagagtgcaattgctgtgtcatatggtaattacatgtgtagtgttaaaaaaaaattacagccaaactgttttccagagtagctgtaccattttatacttcagccatgaaatgcataagaaaatgcctctacatcctcacctgcattttgtgatatcactattttttatttaataattgcatggagatatcttattgtggctttaatttgcacttcactgatggtcagtggtgttgaatgttttttatgtgcatgtttgcctatttgccatctggataccctcttcagtgaaatgtctgtccaagtcttttgcctgtttttctaagacgattgcttatattgtactgttgagttttgagaattctttatatattctagatactagtctcttattggatatatagtttgcaatcattttattgcaatttgtatttggcttttccttttctgttgaggattttttgcaaagctaaagttttacattttaatgaggctaagtgtatcaatttttccttttatatatcatgattttggtgtcaagtctaagaattctttgcctatccctatattccaaagattttttcctatttttttaaagtttgatattttcatattttatatttaagtctataatccattttgaattaattattttagacattgtgaagtttaggttgaagttcatttttttttccctataggtatccaattgcctcatcaccatttgtttaaaagacagtccatcctccattgaattgcttttggacctttgccataaatcattttggcatatttgtgtgggtctatttctgggttctctagtctatcccattgatcaatgtgcctatctttatgaccctgtcttgattaccaaaacgttttacacattgttggattgtatttgctaaggcgttatgggggatattgctattctgagttcatgagaatattgaggtgtaggggttttttttgttttgtttttgtttttgttttttcgctgttgtactatcatatctgctttaggcatcagggtagtattagcctcataaaatatgtaggaacacacttgtttttcatcttttggaagagatttgtagaatttggttttaattgtttaaatgtttgatataatcctctagtaaaatcattatagtctggggatttcttttacaggagctcttaaattacaaattaaatttctctaacggttattgggatattcagattatctatttcatcatggttgacttctggtagtttgtaggaaataattggtcatttcttctaacttgtcaaatttatgagtgtaatgttgtttgtattttcttttattgttcaaatggctatagcatctgtaatagtatctcttgtgttattcctgacatttgtgatttgtcttttctttattattatttttgttagtcttgttagaggtttatcacttttattgattttttaaatttttattttaagttcaggaatacatgtttaggcttgttacatacgtaaatgtgtgtcatgggggtttgttgtacagattatctcatcacccaggtattaagcctagtacccattagatatttttctgctcttctccctcatcccatcctctgctctccaataggcctcagtgtgtgtttccatctatgtgtccatgtgttctcatcatttgactgccacttataagtgagaacatgcagtatttgattttctgtttctattctgctaaggataatggcctccagctccaaccatgtccttgcaagggacatgatcttgttcttttttgtggctgcatagtattctagggtatatatgtaccacattttctttatccagtctagcattgatgggcatttaggttaattccatgtctttgatattgtgaattgtgctgtagtgaacatacacatgcatgtgtttttacaataggacaatttatactcttggggtatatacccagtaatgggattactgggttgaatagtatgtctttctttaagtctttgaagaattgctacactgtcttccacaatggttgaactaatttacacccctactaacagtatataagtgttcccttttctccataaccttgccatcatctgttatttttgactttttcataatagccattttgattggtgtgagatggtatctcattgtgcttttaatttgcatttctttaatgatcagtgatgttgagctttttttcatattatttttggctacctgtatgtcttcttttgaaaagcatctgttcatgttctttgcccactttttaatgttttctttttgataaatttgtttaagttccttatagatactaaatattaggcctttgtgagatgcatagtttgcaaaaattttatctcattctgtaggttgtcagtttaccctattggtagtttcttttgctttgcaggagctctttagtttaattagatcccatttgtcaatttttgcttttgttgcaattgcttttggcctctttgtcatgaaatctttgttcatacctatgtcctgaatgatattgcctaggttgtcttagagagtttttgtagtttggggctttacatataaatttttaatccatattgagttaatttttgtgtatggtgaaaggaaggagtccagtttcaatctgcatatggctagccagttattccagcaccatttattgaagagggaattttccctattgcttgtttttgtcaggtttgttgaagatcaggtagttgtatgtgtgtggacttatttgtgggttttcttttctgttcttttggtatagatgtctgtttttgtaccagtaccatgctgatttggttactgtagctgtatagtatggtttgaagtagggtaccctgatacctccagctttgttctttttgcttaggattgccttggctattcaggctattttttggttccatatgaattttaaaatgttttcttctagttctgtgaagaatctcaatagtaggttaataggaataacattgaatctataaattgctttggccagtatggccattttaacaatattgattctttctatccatgagcatgaatgtttttttcatttgttaatgtcatctctgatttctgtgagaagtgttttgtagttctctttgtagagatctttcacttccttggttagctgtattccttggtattttattctttttgtggcaattgtgaatgggagtatgttcttgattgtgctctctgctttacagtggttgatgtataagaatgctagtgatttttgcacattgatttttgtaccctaagactttgctgaagttctttatcagtttaagaaacttttgatcagagtctatgtggttttctaaatataggatcatatcatctgcaaacagggatagtttaacttctcctcctcctatttggatgcactttatttctttctcttgtctgattgccctggccagggattctaatactatgttgaatagaagtggtgagagagcgcatccttgtcttgtgccagttttcaaggggaatgcttccagcctttgcctattcagtatgatgatggctgtgggttttttacatatggctcttattattttgaggttcaaggatattggtctcaacttttcttatttggttgtatctctgccaggttttggtatcaagatgatgctggcctcatagaatgagatagggaggagtcccttctcctcctcaattttttagaacagtttcagtaggaatagtaccagctcttcttagtacctcaggtagaattcagctgtgaatctctctggtcttaggcttttggggtcggtaggctatttattatggcctcaatttcagagctcattattagtctgttcagggtttcagtttcttcgtggtgcagtcttgggagggtgtatgtgacacgaatttatcaatttcttctagattttctagcttatatgcctagaaatattcataatattctctgatggttgtttgtatttctgtggagtcaatggtaatatgctgcttttatttctggttgtgtttatttgaattttctctgttttcttatttgtctaactggcagtctatctattttattttatttttttcacaaaaccagctcctggattcattgatcttttgaatggttttccttcagtttagctttgattttggttatttctttccttctgctagctttgagatctgtttgcttttggttctctagttcttttagttgtgatgttaggttgttaacttgagatctttctaaccttttcatgtgggcatttagtgctataaatttcacgttaacactgccttagttatgtctgagagattctggtacattgtgtctttgttttattagcttcaaataacttcttgatttctgctttaatattattatttaccagaaagtcattcatatgatccatgtaattggaggctttggagtgaatttctttgtcttgatttctaatttaattacactgtggtatgagagactgttataattttggttcttttgcattggctgatgagtgttttactttggattatgtgatcaattgtaaaatatgtgccatgtggcaatgagaagatgtttattctgttgtttttgggtagagaggtctgtagatatccataagttctatttgatccagtgctgagttcaggtcttgaatatcttaatttcctctctcagtgctctgtctaatattgtcagtggggtgttaaagtctcccactattattgtgtgggagtctgagtctctttgaatgtctctaagaacttgctttatgaatcttggtgatcctgtgttggatggatatatatttaggatagttagatcttctcaccgaattgaacactttaccattatgcaatgtacttctttgtctttttttatctttattgatttaaagtctgttttgtcagagacaaggattacaacctctgcttttttctgtttcccatttgcttggtagatttttttcctttctttattttgagcctatgtgtgtcactgcatgtgagatgggtctcttgaagacagcataacaatggatcttggttctttatccagcttgccacttgtgcttaattgtgggcatttagatcatttatatttaaggttattattgatatgtgtggatttgatcttgtcatcattatgttagctggttattatgcagacttgtttgtgtggttgctttatagtgtcactggtctgtgtacttcagtgtatttttgtagtagctggtaagtatttttttccatatttagtgcttccttcaagagctcttgtaaggaagttctggtggtaacaaattccctcagcattttcttatctgaaaatgctcctttgctaatgaagcttagtttggctggatatgaaattctgggttggaatttctttctttaagaatgttgaatatcagtgctcaatttcttctggcttgtaggatttcagctgagaggtctgtagttagtttgatgagcttcccttgttggtgacctggtctgttcctctagctacctttaacattttttctttcattttaaccttggagaatctgatgattatgtgtattggggatgatcttcttgtgaactatctgactggggttctctacatttcctgaatttgaatgttaacctctctagctaggttggggaagttctcatggatgatatcctggaatatatttaccaagttggttccattctctgcatctctttcaggtacacaagtcagtcataggtttggtctctttacataatcccatatttcttgatggttttgttcatttctttttattcatttttctctgtttttgtctgcctgtcttatttcagaaaggcagtctttagactttgagattctttccaccttttgtcttctgctattaatacttgtgattgcattatgaaattcttgtagtgttttttcagctctataaggtcagttatgttcttctgtaaactggttattttgtctgtcagttcctgcaatatattatcatgatttttaccttccttacgttgggtttcaacctactcctgtagcttcgtgagctttgttcttatccatattctgaattctatttctgtcatttcagtcaccttagcctcagtctggttctgaacccttgctggagagatgatgcggtcatttggaggaaagaagacactctggctttgagttttcagcattcttgtgctgattctttctcatctttgtgggcttatctaacttcaatctttgaggttgctgacctctggatggttttttttttttctccttttgtcctattcgatgactctgaggacttgattgtagtataaggtggattcactaacttgctttatttctgggagattttcaggggccagtgctcagctcccaactcctggactgcatgctctaactctggagaacttgtattgggccccaactttgttctctgactcctagaggtttggagtccactgtgctggggatgccaaggtgcgacagctgcaacagagtgttagcatgggcaggggtgccagcctcactgtgggcattcaccatagtggcagaggcaaggcagctggtagtaggaggaaccctgatggagactatgtgcactgttgtgctggaggtggagttggtttgggacaaggtgctggctggcataggtctgggtgctttctctgtgcccccataagctagtgattgctcaggttgtgggaggatcctttgttctctgtgcagcattagcacaagtatgggacactagtggaggcagggcttcctggctgtgtgccacgaaggctctgtctgcagtgacagtcggtggtgggggtggggagacaaactgcactcccacatgctggcagggcaagtaaagcaaaacccacctgtgcagacacatgctaacaatgtgatgtgtggagttgctgtgggctcaggggaagctgcaatatggggaggtggcatgtgggctggtgtgcagccacaggagccacttcattggagctctccacctgtcgggcttggtcctctggtgcagaagctatggtgtgtgccaccagggcacctgacgctgccttataagcaggcatggtgatgctggggccccaggagaggtaagcaggccaaggagtgctcaggttggaccagtcctgtttgatgtgcaagaccaccctacagagatcaagtctgacagttcccctaaagctaaagtctcttatttaggaggaagttgagcctagggagatagctgtacctggccatgctccactacagctgcacctataccaaagcctctatactctacatcagctggctgctgccccaccacttctctaatcagctatccctgctatctcaagtgtccgtgatggtcaaggggtcctctcctgcctggaatccagaggcctgtggtgagagtgggttgcttcttgccagttcaattcatccattcccctagagctgttgtaggtcaaaaatgaatcccagggctcagtagcccttgtggggttaacagttttctccctcttcaatctagcttgtgtgtctttcctccatccactctcggtgccttccctctgaagatctgttaaaagcataccagtcatttccatccctccatgggagctattccacttgtctacatctagttggtcatcttgtcctcccctcctttattgattttttgaagaacaatattttgtttcattttaaaaattatatttctattttcaattttattaatttctgctctcatcttttatttctgcttgctttgaatttattttgcttttttttactccttgaagtagaaccttagattatttgagacatttatgtttttctaatataagcttttagtgctataaattttcctattagaactattttggctgcattttacataatttaatatgttgcatttcatttatattcagttctatatattttctaagaatttcctttgaaatttactatttgatttatggcttaggttaaaactttattgttactttccacatgtttaaggatcatccttttgtttttctcttattgaattctagtctgattccattataatcagataacatactctgtatgatatcagttctttaaaattcattgaagtctctttattgtttaggatatgatctatctttgtgaataatcagtggaacttgaaaagatgtatattctgctgatattgggataaatgttctatatgtgtcaattagatattattggttgattgttgtattagtctgttctcacactgctaataaagacatacccaagactgagtaatttttaaaggaaagaggtttaattgattgactcacagttccacatgactgggtaggcctcacaatcatgatggaaggcaaaggaggagcaatatcacgtcttacctggcggtcagcaagggagattgtgcaggggaagtcccatttataaaatcatcagatctcatgagacttactcactaccatgagaacagtatggggaaattgcccccatcgttcaattatcttcacctggccccacccttggcatgtggggattattacaattcaaggtgagatttgggtggggacacagccaaaccatatcaattgtgttgttcagagtttcaatatccttgttaatctattggttctatcagatgccgagatggggttgttgatgtccccaactataattatggacttgtctatttttcttctcagctttatcagttttttcttcatgcattttgaagatctgttgtttggagcatacacatttaggatcattatgtcttcctgatggatttttccttttaaaattttgtaatgtccctctttatctctgttgattttatttacctgatattaatatagtcactcctactttttaaaaattaatgtctgcatggtatatttttgaattttttgacattaacccaccatgttattgcctttgaagtaactttttttttgcaaacagcatttagttggatttttaaaaaatctattcttcccatttttgccttttaattggcatatttacatccttaagataagtattgttgttttagcatttaagtaagtgctaaatcataattgtttatttcctctgtttttaatttttctgtttctcttagtgtatatctctgtgtagttttcttagtggttgctctgactattacaatacacatatgtgacttatcagtttattggtgttaacattttgccactttgagtgaagtgtagaaatcttacttccatttaggtacctttacctttcatacttttaaatgtcattgtcctgagtatcaaatggtgttatagtttctgtttcaattatcaaataaatttataaaactcagaagaagaaggatagtatatactcatatttctgttgtttttacttcctaaagctccaataatgcttttattttctttttgcttagtaaatgttatttatccagtctcgaaggattggtcttctaggcacatattcttttggtcttccttcatctgagaatgtctttatttcctctttatgtcagaaagacagacagaatttatggttgagagttcttttctttcaggaatttaaatgtgttatgccattttctactgattaccatagtttcatattctcaattcactgtagttttgtattcttctgggtagtttctttctaggtgctttcaagatttcttttaaaaaatttagttttcagaagttttattatgatatgtcttgacatggatttatttgggcttatcttgtttgaattcttcttgaatttccaggtttacatcttccacgaaatttgtcaaactgctaatcattatttatttgaatagtctttcagcctcagtctctttctcttcgctttctggaatttcagtggaattaatgttggcgttggatctcttgttattgtcccatacacccttgaggctctgttcatttctttatcaatctgttttctctctgtttgtcacattgggtacattttattcatctgttctccagtttgctgactgtatcctctattatctaaacactatgattgatttcatccagtgagtgtttcgttttagttattctatatttcaattccataatttccatttagttctattctatatcttcttgtcctttgatgagattttctaccttttgtttcaagagaatttgtaattgcttgttgaagcatttttatgattatttatttaaaattatagtcagataattaaaacatctgatccatcctggtcttagcatcagttgatcattttttcttattcaagttgtggttttcctagttcttgattatatcttgaacattgtgatattgtcttaggaagctgtgtgttctgcttaaatcttttttttttttttttgttgggagttatatcctggttagttttagcacacatgtctggcctacttttatctgctgtgctttcagtgactacttaattttaggagctggtgttattttgtggtactattttggtctacttagtttatctggtgctgttggggcttcctctgatctttctttgtgattcccaagaagtatgacagggattttccaggctgggccgcctggtttctgtagttgaagaatggcctgtgagaatgaggaacacttcccaggcagggcacttgtgacaagactatcctgcctctagggaaaggagggcacttccctggctggggactgcttgtggcaggatcccccttgccaatgccacctgctgacactgggtggaggagaaaagattccagcctatagggatgaagagtttttatgggctaggtggaatcacccttgctggtcctgcccagctgcctgagtatctctcagtgggggtgtggagtcttggaccctcaatgacagagaggattcctgggctgtgtccaataatgatgagatctccttgccagtgctgctcatggtgcctggtttctcatggtggttcaggggagtcccaggttggtgtggagggtagttagtgtggaagggtagtgcttctagggctgggccatttcttttcagcaggacttctgattgattgtccttttggtattgcttgtctggtctggctgggagaagaatgagcctacccggaccatcttctgttgcttggttggaatttagaaaattctaggtctgtgtttgttgcattttttatgttgttgggggccgtaagacaccctgtcactatgtttttcctctagcgctgagttccattactattttgtcttcctcttcccatctttcagaattctcctttcattgccttttgcattatttccagtgtttgtagttgtacatagcagagaagagcagggagaaatgagtctacatcatcttcttcagaaactctcacactgatgggtttttggaagttgagccatttttcattgctcaaattatgcttagtaataatttattatccttgttgtgtatcacatttgattttctaacattttgttaataatttctttatgttcatggagaatttgtctgaaattttcttatgtggcaatgtccttttcagttttagtattcaatagtcttattattaagactattgaatgctggggctcttataatgagataaaaagtgtgtatttttctctatttctgaacgagtttgtatgaagttgctgcaacttctttcttaaatgttcagaataattcactagtgaagcaaactgtcattgaatatgtatatttacacacacatgctagtatatacatttagattttatattatttcttgagtcagtttgttaagatgtgattttcaataagtatttccacttcatctaaattgtcaaatatcatggcacaaaaaaaattgttttcttaccctgatttttgttgttttcatccctttattcttttcaaaaaacaaattttggccttattactttgttttgtttaaaatttttattaatctttgttcttatttattttattttccaatatattttattatgatttgttcttttttctggcttcttgctatgtgtggttagataatttatttttgtgtttatttttctttcatttaaagctatgaatttactttacagtactgttttagctgaattccgtatattttgacatattttactttcaatgttatccagctcaaacattatttcatttactaaacaaaattgtttttgacccagggtttattagaggcatattgcttattttccaagcatagaagtttttctagtcgtttttttggttagtcatttaatagtttctaacttattttcactgtgatcagcaaatttgtaaatgattttggctctttaaatattatcttggcttactatatgaccaccatagaggtaaatatttcatgtgcccttgaaaagacggtatctcattttattgtttcatattgtggttgtggatttacctatttttttcttatttttattttatatcttataaaacttattttagcttcaggggtatatatgcaggtttgttatataggtaagttgcatgtcatgggggtttggtgtacagattatttcatcacccaggtaattagcatagtacctgataggtagcttttcaatcctctccctcccaccctccaccctcatgtactcaagtgtccatttgtactcaatgtttagcttccacttataagtgagaacacatagtattttgttttctgttcttgtgttagtttgcttaggaaaatggcctccatctccatctaattttctgcaaaggacatgatctcattttttttttatagctacatagtattccatggtgtatatgtaccacatttactttatccagtttaccattgatgggcattaatgttgacttcatgtctgccattgtaaatagttcagcagtgaacctacatgtgtatgtgtctttataatagaatgatttatattcctttggatatatacccaataacgaaattgctgggtgaaatagtaattttgttttaatttttgagaagtcgccacactactttccgcaatggctgagctaatttacattacaccagcagtgtagaagcatttgtttttctccacaacctcacgaacatctgttattattttattttttaataatagctattctgactggtgtgaggtggtacatcattatagttttgatttgcattttttaaatgattagtgatatgtaacactttttcatatgcttgttagctatgtgcatatcatcttttgaagtgtctgttcatgtccttttcccactttttaatggggttgtcttttgcttgtaaattcatttaagttccttacagattctggatattagacctttattggatgcatagtttgcaaaatttttctcccactctgtaagttgtctgtttactctgttgatagtttcttttgctgtgcagaagctccttagtttactgaggtctcctttgtcaatttttgtttatgttgcaattgcttttggtgtcttttttgtgaaatctttgccagggtctatgtccagaattgtatttcctaggttgttttccagtgattttagtttttggttttacatttaagtctttaattcatcttgagttaattttttaaatatgatgtaaggaaggggtccagtttcagtcttctgcctatgactagccagttatcccagcaccatttattgaataggaaggccctcccccattgcttgtttctgtttactttgtcaaagatcagatagttgcaggtgtatggctttctttctgggctctttattctgttccattggtctatgtgtctctttttgtttgagtaccatgctgttctggctactgtagccttgtagtatagtttgaagtcaggtaatgtgatgcctccagctttgttctttttgcttaggattgctttggttatttgggctctttttggttccatatgaattgtaaaatagttttttccaattctgtgaagaatgccattggtagttcaatagggatagcattgcatctgtaaattgcacagtagcatggcatcagtatggccattttaacaatattgattcttcctatctatgagcataggatatttttctgtttgtttgtgtcatcttggatttctttgggttgtgttttataattctcattgtagaaatctttcacctctttagttagctttatttctaggtattttattcttttgggggatattttgaatggaattgtgttcttaatttggctctccacttggacattgttgttgtatagaaatgctacggatttttgtgtattgattttgtatcctaaaactttgcagaaattgactatcagatcaaggaacatttgggagagactatggggttttctaggtatagaattaatcatccacaaacagagatagtttgacttccaatctcttgctattgggatgccctttatttctttctcttgctgattgctctggctaggatttccaatactgtgttgaataggagtcatgataatgggcatccttgtcttgttttggttctcagcggaatgcttccagcttttgcctgttcagtatgatgttggccctgggtttgttatatatgacttttttttttgaggtatgttattttaatgcctagtttgttgagggtttttaacattaaggaatgttccattttatcaaaaccttttctacatttattgagataatcatgtggcttttgtttttagttctgtttatgtgacgaatcacattaatttgtatatgctgaactaacctggcatcccagagataaagcctacccatttgtggtggattcgctttttgatatgttgctggattcagtttgctagtattttgctgaggatttttgcatctatgttcatcaatgatattggcctgatgttttctgtttttgttgtgtctctgctaggttttggtattagaatgatgccagcctcatagaataagttaggaaagagtccctcctcctcaattttttggaatagtttcagtagcaatattaccagctcttctttatacacctggtggaattcagctgttaatccatctagtcctgggctttttctggttggtaggctttttattactgattcaattttgtaactaatttttagtctgttcaaggattccattacttcctggttcaattttgggaggttgtatgtttccaggaatttattcatttttttctaggttttctagtttgtgtgcacagaggtgttcagagtagtctctaagggttgttgtcactgggtttttttttgcatttcagttcagtagtaatgttctctttgtcatttctgactgtgtttatttggctcttctctcttttttcctttattagactagatagtgatctatcaatcttatttattctttgaaataatgaactcctggatttgttgatcttctgtatggtttttcacatctcggtttcattcagtgcagctctgattttggttatttcttgtttactactccctttggagttgttttgatctcttttcttttctcatttctctaggtatgatgttaggttgttcattcgagatctttctaactttttgatgtgggattcagcactataaattttcctcttaccactgctttagctgtgtcccagagattctgtctgctatgttatatatttattttcattagtttcaaatcatttcttgatttgttgcttaatttcattgtttgcccaaatggcattcgggagcaggttgtttaaattccatgtaattgtatggtttttgaatgattttcttagtattgatttctatttttattgcactgtggttgaatgttgtgtttggtatgatttcatttttttttaatttgctgagaattgttttatagctgattgtgtagtcaatttcagagtatgtgccatgtgcaaatgagaagtatgtatattcttttgtttttgaatggagatttctgtagatatctgttaggtccattttgttgagtgccaagttcaagtcctgaatgtcttcattagttttctgccttgacgatctgtcgaatactataagtgggctgttgatctatcccattattattatgtgattatctcagtctcttttcaaggtcttagaagaccttggtgcttctgggtttgatgcatatatatttagaatagttaggtcttcttgttgaatcgaaccccttaccatttatgtaatgccgttcttcatcttttttttttttttaaccattgttggcttagtctgtttggtctgaagttaaaatcgcagtccctgcatttttctagcaaggttagataccttcatggacagtatcctcaaattcgctttccaagttgcttgctttctcttcctctctttcagtgactccaagtcatagatttggcctatgagtcatagatttggtctcttcacattttctcatatttatcagaggttttgttcattctttttaattctctctctgtctgtctgtctttgtctgactgatttaattaagagaattgtttttttttcgagctctgagattctttcctcagcttggtcaattctgctgttgatacttgtgatggtattatgaaattctcaaagtgagttttttagctctatctgatgaatttggttcttcttcaaatggccacttcatttttcagctcccatatcattctattgtattccttagactccttgaattgggtttcagctttctcctgaatctcaataatcttcattcctatccatattctgaattctatgtctgtcatttcagccattacagcctcattaagaaccattgctggcgaaccagtgcagtcattaagaggtaagaggatactctggctttttgagttgctagagttcttgcactggttctttctcaactgtgtggactcatattccttcaatctttgaagttgtcctttgaatgagattttttgctttcattttctttgatgcccttgggggtttgattgtggcataatgtgggttcagtcaactagctttatttcgggaagattttaggggatcaagccccagctcagcactcctgggctgcctgctctaactcttgaggcttggtgccaggcccccagctttgttctctggccccttgaagttaggaacctgctgtgctggaggaactgaggtgttcccattctgttggcccaatgatctgatgggagatgctggccagagtgcttcatttaaatggtggcagcaggatccttgctcacttgtgcctgccagtagccacagcagtgtggcagggtgtagggtgcagtgtggcagggtgaatgtggcagggtgcatgtgttggcaagtgtggggcactggcacaaatggagtaacagcattccggcacatgcttacgcccgcaacaacagggtgggggacgggggagggtcacagttgctggcatctgtgaacatgttcacagggattttcccttctttttagtctgaagttatgtcattggggatgctagtcattttattggtttttaaaaatcaaatctaatctgacaattctagacttttgcttgggttttgttttgttttgttttgtttttgacggagtctcgctctgtcgcccaggctggagtgcagtggcgcgatctcggctcaccgcaaccttcgcctccagggttcaagcgattctcctgccttagcctcccgagtagctgggattgcaggcatgtgccaccatgcccagctaattttgtattttttttttagtagagatgagggtggtttctccatgttggtcaggctggtctggaacacccgacctcaggtgatccacccgcctcagcctcctaaattgttgggattacaggcgtgagccaacgcgcctagcctgattgcgggtatttatctacttacagtcaatatagtgactgatttatttgggtttatggttatcacttttctcttttttatttgttattttatctttttttcctcttcttttttaccttaatttattgaagaatattattctgttttctctttcataacttaaatttatatatatttgaaaatataagttattgataatcagtttgtgaatcaatattctgtgcattacacacatattttttgtccagttgttttttactattttttccattctctttttgtgattatgttttctattgcatttctctcttaccatatttttgattgaccatttaaaaaattagttcttttgccccctgtattaacttgttaccttttgctattcctttagtgaattccctagagattaactaatacatttgactcattacaatctagcataaattattcttttaccttttccacactaacactgaaaagtttcagtattagcctattttaacataattaaattcaaatgcttctgcacagcaaaagaataatcagagtaaacacacaaaccacagaatgggagaaaatatttgcaaatgatgcatctgacaaatgactaatatccagaatctacaagaagctcaaataaatcagcaagaaaaaaaaaaacaatcccatcagaaaatggacaaatgacatgaatagacacttttcaaaagaagatacacaaatggccaacaaacatgaaaaaatgctcaacatcactaatcatcagagaaatgcaaattaaaaccacagcgaaatatcaccttaccccagccagaatggctgttattaaaaagtcaaaagcaacagatgttggcatggatgtggtgaaaaggaaacacacactgctggtgggaatgtaaattagtacaacctatatggaaaacaatatgggcatttctcaaaaaactaaaagtagacctatcattcaatctagcaatcccatgtctggattttttttccaaagggaaagaagtcatcacatcaaaaagacaccttcacacatgtttattgcaacacaatttgcaaagatatggaaccaacctaagtatccatcaactgatgagtgggtaaagaaaatgtggtatatatatagtgtggcatactactgagccataaaagagaataaaataatgtcttttgcagcaacttcaatggatctggatgacattattctaagtgaagttaactcagaaatggaaaaccaaatatacattctcaattataagtgggagctaaactatgtgtatgcaaaggcatacagagaggtataatagatattggagactcagaagactggaaggttggtggtgggggggtggtgagggataaaaaactatatattgggtacaatgtacactacttgggtaacagatgcactaaaatctgagattcacagctatacaattctccatgtaaccagaaaccacttgtacctgaaaagctattgcaattttcaaaaatgtgaaaaaatgaattaaaaaacaaccaaaaagggctgggcatggtggcacatgcctgtaatgccagcaccttgggaggccaaggcgggcagatcacttaaggccaggaattcgagactagcctggccaacatggtgaagcaccatctctactagaaatacaaaaattaactaggtgtggtggtgtgagtctgtaatcccagctacatgggaagctgaggcaagagaatcacttgaacccgggaggtggaggttgcagtgagccaagatcgcaccactgcactccagtctctcgccggatcgtactcttgcgacaaggcaagactccatctcaaaaaacaaacaaacaaacaaacaaacaaacaaaatcaactctttttaagtcttttcctcttttgctttattgttgtaatatactttcattgtgcatattttaaaacccttaatacattgctattttttgaataatgatcatttaatcactatttagttatacttattcacacacttaatttttcaattgttcttagtcctttctacttttctctgggatcctttcctacccaaggaactttctttagtgtttctttcaatgcaggtttattggtgcccagtggattctctcagtattcttttgaaaatatattttttccagcactcattgatgatggttatttttactgggtgtggaattttaagctagtagttatttttcttttataactttaaaaggtattattctactttcttcttgattccatcattcctgggactgtcagtcttatcatttctcatttgaaagtaaaatggtaacattttttcccctgactgttttaaagttttcagtagtcttactgtatttagatatagttttttttcatttctcaagcttgatattcacagaattatttaattatttgcatttaaatatattatcagtattggacaattctcagtttgtatttaatcttatattgcttttggtgaattccctctcttctctctgaaatgctaattatacacattggagcttttaagcatgacccacatgttactgttttaccccctctttggttttagtcattatgcatttttaattttctgtttatttttgtttatatatattttaattagattctaattatttctcaaattatctttatttttctcttttttgtaatttaaaaaagtttcttgaacatatcatggatttttcaataacttgattgagtcatattttacaaatcacaatgcacccatttcaagtgtatatttcagtgacttttagcaactttactgagagatgattgaagtaaaataattgagattttgacaatgtactttttttttctttttttattatactttaagttctagggtacatttgcacaacgtgcagatttgttacatatgtatacatgtgccatgttggtgtgctgcacccattaacttgtcatttacattaggtatatctcctaatgctatccctaccccctccccgcaactcatgacaggccctggtgtgtgatgttccccttcctgtgtccaggtgttctcattattcagttcccacctatgagtgagaacatatggtgtttggttttttgtccttgcaatagtttgctgagaatgatggtttctagcttcatccatgtccctacaaaggatgtgaacacaacattttttatggctgcatggtattccatggtgtatatgtgccacattttcttaatccaatctatcattgttggacatttgggttgtttccaagtctttgctattgtgaatagtgccgcaataaacatacgtgtgcatgtgtctttatagcagcatgatttataatcttttgggtatatacccagtaatgggatggctgggtcaaatggtatttctagttccagatccctgaggaatcgccacaccgacttccacaatggttgaactagtttacagtcccaccaatggtgtaaaagtgttcctatttctccacatcctctccagcacttgttgtttcctgactttttaatgattgccattctaactggtgtgagatggtatctcattgtggttttgatttgcatttctctgatggccagtgatgatgagcattttttcatgtgtctgttggctgcataaatgtcttcttttgagaagtgtctgttcatatccttagcccactttttgatggggttgtttgtttttttcttgtaaatttgtttgagttctttgtagattctggatagtagccctttgtcagatgagtagattgcaaaaattttctcccattctgtaggttgcctgttcactctgatggtagtttgttttgctgtgcagaagctctttagtttaattagatcccatttgtcaattttggcttttgttgccattgcttttggtgttttagacatgaagtccttgcccatgcctatgtcctgaatggtaatgcctaggttttcttctagggtttttatggttttaggtctaacgtttaagtctttgatccatcttgaattaatttttgtataaggtgtaaggaagggatccagtttcagctttctacttatggctagccagtgttcccagcaccatttattaaatagggaatcctttccccatttcttgtttttgtcaggtttgtcaaagatcagatggttgtagatgtgtggtattatttctgagggctctgttctgttccattggtctacatgtctgttttggtaccagtaccatgctgttttggttactgtagccttgtagtaaagtttgaagtcaggtagcgtgatgcctccagctttgttcttttggcttaggattgacttggcacattttaataattttcaggatatatacacatatacatatatatatgcatacagacacccaaatttttgttacgatcaagataaacaattatttggatcaccctcaaatttgcctgtacttctttgcaatccatgtctccctctaacaccacccacagtcaactattgatctgttttctttttttttttttttttttttttttttttgagatgaagtcttgctctgtcacccaggctggagtgcagtggcacaatctcagctcactgcaacctctgcctcccgggttcaagtgattcttctgcctcagcctcctgagtagctgggattacacgcacctgccaccatgcccagctaatttttgtatttttagtagagatggggtttcaccatgttggtctgctgggctccaactcctgacctcaaatgatctgcccatttcggcctcccaaagtgctgggattacaggcatgagccaccgtgcccagcctgatctgttttctgttacaatggtttatttggtgtttcctataattttatgtaaatataatatataatttgctttttttttactctttcttctagaatgtgattttgagactaatctacactgttaatgtttgttaagaggtcttttctttttattgttgagtaatttcattatatgggaaaaccatatttctttatctgcttatccgttgatgagcatttgcattgtttctagattttggctatttttaataaagctgatacaagcatttgtgtaaaaaatgtcttcatgtggatatatatttatatttcccttgaatgaatatcaaaaaggcagaatggttgggtcatattgttgatgcttaatttttaaagaaacgtccatgctgttttccacactgcatatttgatttttaatttccttcagcaatgtattaacatttcaattcttctacagccttgcctccgtgtagtatagataagtttaaaaatttttagccattataaatggtataatggtataatagtggtatcttgttgtggcttttataattaaaaaaataattttagaatttgaaaagacagcacaaataattatttgatgtacttccctcaaattcctttatttttaacatctcacacaataattataaatatatcgaatctgggaaattaaccttggaataatatattaacccatttattcctgaggttgcagttttttgaatttgaaaaatcagaccttggcgatgaccttgagcagtaggatatgaagaactcccacatccttagcgtcccaatagtggaacactagacatatgaagtaaactatggactttattatgattttgcctgttttcctactaatgttcttttcctttttcaggatcttttccaggaatccacatagcagttagtcatcgtggctctttcctcctccaatctataacaaattgttagtttctttctttttttaaagaccttgtcaattttgaagagtatttatcaggtattttgtagaaagctcctcattttgagtgtatcagaagttttcttttcttttctctttctttctttctttctttctttctttctgtttctttctttctcccttctttctttccttcctcccttccttcctgcctgcctgcctgcctacctgccttcctgcctgcctgcctgcctgcctgcctgcctgcctgccttccttccttccttccttccttccttccttccttccttccttccttccttccttccttccttcctctctctttctctcccttcctccctccctctctctctctcattctctctttctttcttgacagttttgctcttttcgcccaggctagagtgcaatggtgtgatcttggctcactgcaaccttcacctcctgggttcaagtgattctcctgcctcagcctctcgagtagctgggattacaggtgcccaccaccatggctggctaatttttgtatttttagtagagacagggtttcaccgtgttggccaggctggtctcgaactcttgacctcaagtgatccgcctgcctctgcctcccaaagtgctaggattagattacatgcatgaaccaccatgtctggccagaagttttcttatgattagacggaggttatgaattttggggaagaacaccacctggtacccttctcattgtatcatatcaggggatacatgatatccatatgatgttaaccttgattgcctgtttaaggtggtgtctgtgaggtttccccaatgtaaagttactagtttttgtcatatgatatttattagaagcaagttactaagtccagatcatgttgagatgttgaggaaaggggagttaacattcatcacttggtgtggggagtaacaaaaagttgtgggtacttgtcaaaatcacaataattaataaacttctgggggaatatgctttgaaacggtgcaaatatcttatttctcctttaattttttcccactaattttagcgtttatcagcgaatcctgcatgcagcaattgttgctgttgtgctttttgtggtgatttgatgtttcccttgttcctcttactttacttggaattcttacgtaatgaggatttgactcttcccctccctcccatttatttatttgttcaaacatgcattatatcagtatgaactcatggatttttttatgccaatctttgagttataatcaaatactattgtgcaggacatggtggctcactcctgtaatcccagcactttgggaggctgaggcgggcggatcactcaagctcaggagtttgagaccagcctggtcaacatggcgaacccctgtctttgctaaaaaatacaaaaaaattatccaggtgtggtggcatgtgcctatagtcccagctactcaggaggctgaggcacgagactcgcttgaacaggggaggcagaggttgcagtgagccaagattgtgccactgcactccagcctgggcgacaaaatgagactctgtcaaaaaaaaaaaattactattgctacatttttctggctttggttactgggaactgtgtcaagtagcctcctatctcctttggacatgcctccctcatcctttttgaggacttctttattttctcatgctataagatgctctgttcccatcttgtattttccttgcctctgacctagaattagccatgtctccaaggagctctggcttattttattggtatctggcttatttcagtggtatttagaaactaaaatatgggtgattaatgtatctgcttttactgagctatcactgcttcttggaccttttaatggacaaagtgaggaagtatatgcatgtgtattaactcatgtatgcacacacatctctatttctgtctgtctgtctatctatccattcatccatccatgtgtgtgtgtagatgtatatttgtagatacaaatagatggaaacataggtagatataaacacacatacatgtatgtataaataatcatgatttctaactcatccatcaggaaggattcattctagtcttctctttttacttatttgttacttcactctttgacagtgagaaagttggcttccattatctacaaattatttacttatttgtccaacctttggatacatggagtatcagaactgctaatcagcatgcatgtgagaaccaaatttaccaactaaagaacagcatttaaatacaattcttttggtatttaggttcagagtatccaagcaaatcactgtttccaaaagctacttaggtcaactccctttcccccactgccttcagtgaggttatgcctttcatttgtgctacaatgaaattcttttttttttctgagacggagtcttgttttgtcactcaggctggagggcagtggcaagatctcggctcactgcaacctctgcctcctgggttcaagcgattctcctgcctcagcctcctaagtagctgggattacaggcacatgccacactcctggctaatttttgtatttttagtagagatggggtttcaccatgttggccaggctggtcttgatctcttgacctcgtgatccatctgcctcggcctcccaaagtgctgggattacaggcgtgagccactgcacctggccttctgaaatttattttttatagccaactttccatcctggaatcttttgacattctggctataattttttttaatgttgttattattgagatagagtcttgctctgtcatccaggctggagtgcagtggcacaaatatggcccactgcagccttgacctcttgggctcaggctctcctcctacctcagcctcttgagtagctgggaccatagggacatgccaccatgctgggctaattttgtattttttgtagagatgggtctcactgtgtttcccaggctggtctggaactcctggacccaagcagttctctcactttggcctcccaaagtgctgggattacaggcatagaacttaaaacagaattaccattcgacccggcaatcccattactggatatatacccagaggaatataaatcattctaccataaagatgcatgcatgtgtgtgtttgttgcagcaccattcaaaatagcaaagacatggaatcaacctaaatgcccatcaatggcagactggataaagtaaatgtggtacatatataccatgaaatactatccagccataaaaaataatgagatcaggtcctttgcagcaacatagagctggaagccattgtcctaaggaaactaacacagaaatagaatatcaaatgctgcatgttctcagttataagtgggagctaaacaatgagaacacatggctgctaggaggggaacaacagattctggggtctacttgagggtgaagagtggaaggagggagaggatcagagaaaaatacctatcaggtactatacttattacctggatgatgaaattatttgaacaccaaatccctttgacacacagtttacctatataacaaacctgcacatgtacacccgaacctcaaataaacgttaaaataataatgataacaaaaagcatgaaaaaattatacaataaagtttacttttgtggtgtgcggttttatagattttgacaaatgcacagtgtcatgtatccaccaacatggtaacatgtggaatagttccatcaccctaaaaattgtcttgtgtggcttctttctattcaaccccacatccttaaaaaccagccaggcaaccaaccactagtcaaatttttgtctctataggttgactttacaagaattttataagtgagttacatgatatgtatgtagcctttggggtctgtcttctttcacttagcaaaatctatttaagattcatttatgctgttctgtaatttgtttcttcattttcttgctaaatagtattccatcattggatgtaccagggtttgtttatccattcaactcttgaaggacatcttgattattttcactttttggcaattctgaataagggcattatcaaaatttttgtaaagatatttatgtaaaagtaagttttaattcatttggatgtataccttgaagtagaattgatgggtcatgtcataagtagataatttattttcataagaaactgccaaactttttatcaaagtggctgtataattttgcatttccaccaacaatgaattcatgttctttttgctccacatttttgccagcatttggtgctgccaatttattatcataatatatatttttttaaatttagccattctaataaatatatagtagtacctaattgaggtgttaatttgcatttaactaatgactaatgatgtaagcttttttttacaaaaaaggagttgttttgctttattgttgaagtattaattttctatagatgtattcttaatagaaggtgttcattagataagagttttaaaatatctttccccatctctgacttgccttttcattacttaatagtgtatttttgcagaagaatcagtacttaaattttgataaatttcaaattacatttttttggtgtattgtgattttggtgtcatatgtaaaccttctagaaacctaagttcaagaagatttttctctttatgttttattctagaagttttaaagttttacatttaagtctgtggtccaatttgagtttgtatctggtgaccttgttaaacttacttattagtttactaacttactacttactagtagattttaatataattgtttagttttttctacatagagaatcattttatctgtgaataaagacagttctatttatttctttccaatctatatttcttgtatttcttttgtttatttttattgtcttattacatgccttccaatatgatggtgattaggaattgtgaaataaggcattccttcctcgttcccactcttagggagaaagcattcagtgtctttcattaaatgagatattattgcagatttttaaaaagatgtcttttattaagtcgtggaagtttccttctgttcttagttccttgagagtttttatcatgaatagatgttgaattttgttgaatggttcatggagatgattatgatttttttctctcaggttttcagtgtgatcatatggcgaattccagcaattgatttttgtatgtgaaagcagttttgcattttgggcatgaacatcacttggtcatgatgtattatcttttttatatgtggctcctttcagtttgctggtattttgctgacaattttgcatctatgttcacatgaactgttggtctccagtttttctgtaatgaccatttggttttggtatgagcataatgctgacctcataaaaagagttggtaaatattctctcctcttctgttttctagaagaaattgtgcagaattggtattatttcttcctgatccatcagtgaaactataagggccttttgaaaggtttttaactacaaatttaataactttaatagatatgagggttatctcattatctatttcttcttaagtagtttatagtagtttgtatgtttcaaggtattgattattttcatcaaagttgtttaatttatagacatagaattattaatggtattccgttaatatcatttaaaagtatgtagtaatgtcctattttaattccagatgttagtagtttgtgttatttctattcattacttggacagactgactagaggtttatcaatcttactcatcttttcaaagacactatcttttagtttcattgatttttctctgttgtttttctgtttttaacttcaatcatttctgcttttacctttattattttccttctattgcttgttttagctttaatttattctttctctaattacttaagttagaaacttaggttatttattttatatctttattctttctttaacatagcatttaattctacacatttccctctaagtcctgctttggctacatttcacaacattacataagttgcataattatccatccatttattttcaatctgcctggcatttatatttaaattgttgcttgtatatgcagcccatggcagggtattgctttttgtccactctatcaatatctgcctttaaattggagtgtttggcacattgtataattttgtgtaattattgatagagttgggtttatgtctacaattttcttattaattttttggttgttcagtctccatatcctttttcttgccttttttgaattatttaaatttttaaaaatatttcattttatttatttacattttgggtatgtattttctgtcaatatttaagggatttacgtagcattaatattgtatcactttatgtaaactttagaaaatttctagcatggaggtccctataactctcctcccttacccctatgctattttgcattatagatgtcatatatatctgcatacactgaaagatctaacagatgatataattttttatttcaacattcagttgcacacatttaaaagtacttaagatataagaaaatagcctagatatttactatttattttattctttaatttctgaagatgcaagtttccctctggtattgtttaccttgaatttttttaaacataagtttttaaaaaatgttttaaagcaaattttaaaaaacatttttaatattgtaggcctgctgtaaaacttctatttgtttttcttcttgtgagaagattgtaagtttcatttgttcttgaaggatatttttataggatataaaattctggtttgacagttcttttttttttttcagcgtttcacattttaaagatgttgttccactttattctgacttccatatcctctgatgagaaatcaatggtgattccaatcctgcttcccctgtgtataatgtgttgttttcttctggctgctttcaggatttttccttttattttgttttcagcaatttgattaagatgtatgtagacatggttttctttgtgcttatactttttggagttcactgactgtcttgaatccgtaatttatatatatatatattttatcaaatttggaatgttttctataattactgctttaaatatttttgcatgaaaatgtttttctcttcttctggggctccaatggcacatcaattaaaccatttaatgtagagtcctagaggctctgatctttctttttcaatcttttcccccttcttttctcttcagattgaattgtttctattgttctattcaagttcaccaaatataaagcaatacatgagtttccatgctaactttaggtaccaatgctgccattaccaccatgctgatacacagcaagagccctcttaagttgaaagagagcaggggaatatatatatacacacatatgtgtgtgtatatatatataatatacacacagatatacacatattaatacacatacatacacatatatatgtatatatagacacacacaaatatgtagtgaaagagagagattggggggagggagagagagagagagagagagaacttctgtttgcttgtttagttttgactttcattcacaatctgcctgcattacctcacactttagagtcctcaggtaattattttctgcatttttttccagaaattatagctccaactagcagaagggctgggctgtaatggattcctaccagcctagcggaattggaattccagttatgtcttttaagtaaattaagaggtttaaaaaataataaaatgctaatcattgctatctccaagagggcttttacagccactatacatcactgccattatcacaacatatatgtcacctttgtacatacaccctgatcatcattttttgaagcacatttccacaggttatcaagttccaggtttgtaattttctttattttaatactttatgtatgtaatcttattctcatgtcatagtaaggtttgattttttttctctttctcctttgtgtatctgttctaactatgatttttgtaattttgtgtgttttcatgatggtagttatcatcttttcacttccagatgtaggactcccttaatcatttcttttaacaccagtaaagttgtgaatcattcctgtagtttttgcttatctgggaaagactttatttctccctcctttctaaataacagttttgcctagttcttgactggcagtatgtttttctttcagcactttctataaattattccattcttttctggcctgtaagatttcttctgagaaacctactgttggtctaattggaattctcttatacctgacttgctgtttttctcttgctgcttttagaatgctctctttgtctttgattgatgattagctctaatgtacgtgggagaggatgtgtttgtgtttaatctatttggggtcctttgagctttctggacctggatgtccatctctctctttctagacttgggaagttttctgctattattttatcaaaaatgttttcctcacctcttcccttctcttcaccttctgattgctcataatgcaaatagttattcacttaatggttttccataaattctgtaggctttctttatttgttctttctctttttttgtctgcttttgttatttcaaaagatctgtcttgaagtttagaaattctttcttttgcttggtctcgtctgttgttgaagctcttgattgtattttttattccattcattaagtttttcaggtctagaatttttgtttggttctttttaaaaataatatctatctctttgtttaatttttaatgcagatactaagttggcttcctaatttaattgaatcgtttatttatattatcttgtatctcactggcattttgtatatttcctttgatttggggtctattactgcaaaattattgtgttactttggaggtgtcatgtttccttgctttctcaagtttgctgtgtccttacattgatatttatgcacctgagggaatagtagcctcttccaattttatagaataggtttcataggaaaagccttattcctatagatgggtttttatatgtcgattggctgggatgtactgactttggttcttggtacataaagtagtgcagtttcttcagatgtaatccatgttagtgatgtttgatagtgcctcagtggcctaggttgtgaggatttgtggtggtgatgacacagcttcttcaggggtgggcttgctgaagtgtttctcaggctagggtgtatgcatgaacacagtggatcagccaacttgagggctggttcactaaggtttgtgccaccaggatgttttttggactttgggtgcaggtgctcaggatgagtcagctggcttggggactggctcaccggggtcagggtctctgggttattactccaactggagacatgagtcatgcctgtttggctggcttggagtgggtctgccagggttgggtctactcagctatttctgtggtcagggtaatgggtgcatagccactaagccagttcaggcatatgtctgcctggggcaggtccaccaggctgtttttctgatggggaatatgatgatgcagatgcttgggagcttaggggcatgtcggccggggcaggtttgcctggcttcatctccagttgggagtgagggtgcatggtagttaggtcagcttaaggccaggtctgcctggaatgggtctgctggagtgtttctcttaccatgactcaggcacacagctgctcatctgctttggggccttctctgctagagtcaggtctgctagactgtttctccaactctggccacagctgcttagcagctcaagggtgtgtctagccagggtcaggtctgctggactgtttatctggccagggacatgggtgcacagcagttcagctgacccaggatggcttacctgcagtgtggtaagggagcaagggccattcctgggcccaggctctgagcagctggggtcatggtgttacagccacccatgtgggtggagagatggtggaatcccatggttggaggcccaaagttgctactggcccccagggcagagcacactccagtagtggctctggttttaagatggcaccacaccccagcagctggggtcatggtgttacagccacccatgtgggtggaaagatggtggaatcccatggttggaggcccaaagttgctactggcccccagggcagagcacactccagtagtggctctggttttaagatggcaccacaccccagcagcttgggtaattggataatggaagtacaaaacttgtgctcctaatccagtgaaaagcagccatgtgaattccagacagctcccagactgagctgagggattgtgaagactgtgggattcttctgtagtaaagactacaggggggctatagtggcagtgagggctgctgcaggtcctctgctttccctttcccacaggaagaagtccctccactctgagctgatctcaataagagagatggttcagcagagggagggtgccttgctcccctctctgctaccctcttgagtctctgaacactgaaatgacttcactactcctttgttacacttcagcactttccctctgaagtttcagtaaaagttttagttgttaatttacttacttggtccttttttataaggagaaatgtgtggcaggtctttctaattacccatcttgctgatagcactccttttgtctaggcagatttttgttctgaaagtcatccatcctattgctgctccttttaaaggaacatacttttttgtctagctgcttttaaaattttctctgtgtttgagttttgggagtatgtttataatgtgtttaggtaggtgtggttttgggagtatgactataatgtgtttaagtaggtgtggcttttattacttttatcctactgaagttattgagggattggtttgatgtgttttattaaatttaataatttaagttgtgatactttctcttcttttgagacaacaattaaacatttattagacatttttaacaggaacttgtatcttttatgctctgtttttttcctcattttatttttttctctgtgaatcagttgaatattgggtataaacatatttataggttaacgagtcacgtcttctgctgtgtccggtccattttattctgatttagtgaatattcgattttatattttattttacaattctcgactgtatttataattttttgtggatttaaattatttgttcaaattttttaacttttcattcaggttgtctctcatttcctctgttttctttgacatacaagcataatatagacataatatttatttttaaatgctggtctgttcactcaatatctttaccttttaaggtcttaattctattgactattttatctcttgattatcagtcattttctgttttttaatatgtgtaatagtacatttttacgtttcctggacattgtgggagatacgttgtaccatctttggtttatgttagttttgtctgattattgtaaaatgctatactaaaagtcatttttgttgctaacaaatcatcttggtcctattgaggtatgattttcaatttgttgtgggattctattttagccttttcctcactcttacttagatcatgcttgcactgaaggcataacctcccttatgtgtcacttaaaagtcattgacatttattcatcgagatgtttatactttgcctgggcctaaagtttaacgtatttccagaactttgtgacctctgaaatatgtgctaatttctccattttcctagttggtcagtgacatcatcttagactttttgcaagctagttacgtgtcataggagtcatccaagagtttgcaatttttacagagatattttggacttctttttaatttcaaattgttcctttctcttaacatacttcacaaatttttctcaccttggtaccacaaactcttatttctattcccttcacctagtgagactctcattccgtgcttgtgtttgatttccatgcaaaactgatttaaaaatatctgcaggtaataatgtctggtgtgaatatgggcctcctgccatgtttttcttgttattgcaggagtaaccttgtaattgtttatatctaaggcctgaaatcagttattttctacattttgatagattttataattatttactatgggaacttcccttatttttatgattctattatatatttattcatgccatttccctgaagtgttgttcagtttaaatagatttgaactttcaaataaaggtatctcctgggctttacttttaaactcaacactgttatgttaataaagtttattatatgtgcaactatgttgtttaatttatattactgatgtacaagagtttctcttgactatgtacagaaatggaattcctgagtcttgtgaataataaacttaaaaaatcaacttataatatctatttgttttccaatgtggttatattaattatacttccagcagtgaatacaatattccactgatcctcatcttcttcaccccttactattttttaggcttcttatttatgccactcgagagaatgtaaaatagtatcacattttgatcatgttttgcatatccctgatcactatgaaaactgagcagctcttcatatgttaatttaacatatgtttttttccagttaatattcatttccatttctcattttttctacgggaatatttatctctttctaactgattaatgagagttcttcatgtagtttctgaaacttctaactttttgattttaagtcacatgattatctttcatatattcgtatcattcttccctccatatttttaaggtgtctaaaattactaattcttaatcttaataaatcaagattctttttctttccttttttttttttatttgaggagatggaatcttgccctgccatccagaccagagtgcagtggcgtgatctcagctcactgcaacctctgcctcctgggttcaagtgattctcctgcttctgcctcccgagtagctgagactacaggtgcgcgccaccacacctggctaatttttgtatttttagtagagatggtgttttgccatgttggccaggctggtctcaaactcctgacctcagatgatccacccacctcagcctcccaaagtgctgagattacaaacataagccactatgcccagcccaagattatttttctttacagttaataaaccaagattttttttttacttttaaaagcagtactatttgtctgaatccaaggtaaaatatatattcttacattttgtaaagtttaaaaaaatctgttgagatgtaatttacaaatattaaagtgcacccattttgattgcatgattagattagtaatgataaatatgttcatacaggtaaccaccaccctatttaagcactagaacctttccatgacactaaaaagttctcccattccccttttgaattgaatgcccccttcattgtaggcaagtttttgatttctgtcactataaatattatctattctagaacatacaaataaagtacacagtcatcttttatatcaattttcttttaattagcctaatgtttttgagttttccacgttgttttgtttattcctttttattgaattgttcctttttatttgagtggcatttcattatatgaatattatcacaattttatgaaaatttgtttttttttccaaacttgggttatcataaatccagcttctgagaacattcacatgcaattatttgtgtggatggggacgtatgctttaatttgtcttaattaaatatctagggttatgataaatgtctagccatagtctaagaacacagtctaagaaattgctgaactgttttccaaattggctatatccttttgtattctcaccagaaatatatggaatttccagttgctccactttcttaccaacacttggcatgactgtgttaatttttgtcattctggtgggcatatagtggtatttgtgttttcaaattcttctataaagactaataatattgagcatcatttcatgtgcttgttggtaactcttaatgtgttcttttgtgaagtgtctattcaaatcttttgcccatttaaaacattggattgcttgtcttctttgattgagttatataatttcttcaatattctggataccattcattaattaggtgtatgtattgtgaatattttctcccagaccatagcttgcttgtcttttccttaatggacttttttttttttaaagcatgatagttatggggtccaatttatcaatctttcttttatggctttttgtttcctattaaaaaaactttgtccatcccaaagtcacaaatatttttccctatgtttttgtctaaaattttatagttttatgttttacttttctggctatgattgattttgaattattgttttgtatgtgttgtgagggaggtatcaaggtatttatttacctatttatttatcatatgatatctaattattgaaaaggcatttcttgccctaatttattactttgggatctttgttgaaaatgcattcagcatgtatatgtggatctttttccagactctctagtctgtttagtttttaaaatacacttatctttaagctaataccacaccttcttcattactgaagctttatagtcacatgatgtaaattcttcacttttactgccttggtaaacattattttgtctattcttagtcctttaaatttttagaatcacataatttcttagagtcaaattgtctgaaaacatctgggattttttgggggggattgttaaatcttttgaccaatttagggtttattggacatcttaacaatattgagtctttcactcatgaacatgccaaatcttttcatttatttaggttttattttatttttctcatcaatagttttttagtacacagcccttgcatatatcttattaaatttagtattatgtagtttatgttttgtacactgtttcaaaagttgttttaaatttcatttttcagtggctaactaatggtgtgtagacagataccaggtttttgtatcctgtgaacttgttaaatatgtattagatctagaattttatttctatattttattattatattcctatatattatgtatagtatgttcctatattctagtatatttttcttatcttctttgcattttttagatatatgaccaaaagggcagtcaacttcttccttccttttctcccttctctctcctcccatcctcttttttccttcattttcttttcttttcattctgtggttttttcttttgtacctttactataatgttggaaagatgtggtaagagctgacatccttgtccccaaacttaattagaaagtattcaggttttattattaagcatgttgtgaaatgaaggtttttttgaacatgggctttatccagtttttttgttgctgaggcatttaccataattcagctttgaatgtaatacaatttttactgtgattgttatggtaatttgttgccttattctgttaatgaggagtgaattatattgactgattttttttgaaaggtaaaacaaccttgcaattctatgacaaatacgtacatagtcataatgctatatcttttttatatataagtgaattagatttattatgatgaagggtattaatctatgatttttttcttgtaatgtctttgattttgaatgagtataacattggtcatataaaatgagttaggaagtaccctttcccctgttctgtctgaagttgtttgtgtgaaattggtattgtttgttcccatatggttgtgtaaagccatgtagacctgtattttctttgtatgaggcttttgaattatgaattcaatatctttaattgttacaggtctatttagaattcttagttcttctaatgtcagttttggtcatttggatctcaaaactttttttttcactttattttttcaaattcattggcatattatttatagcagtcttttattatcattttcatgttcgtagaatcagtagtgataccctgtcttttactccctagatgggtaatttatgcttttttttcatttttttcttccttaactagtctaaatagggttttatcaatttttattgttactgtcaagaatgaatttttgtctttatatattttctgttttttttcaatttcattgatatcccctatttagtgttccattaattctatttattttgtgcttactttgttcttcttagctccttaattgaaagcttgggttagtgactgtatacctttctcttttaaaaaaatataaatattcagaactataactttttaaataaatactgctttgactgtgtcccataaactttgctatttgagtgtgcattattttttagctcaaaatataacaaaaagtataaatgtgtgaggtgatggataccccattgactctgatgtgattattatgtattgatgcttgtatcaaaacatctgatgtaacccacaaatatatacacttaccatgtacccacaaaaattaaaatctaaaaatatattttctaattttcattacagttttttgaccaattggttattttcacatatgttgcttaaatttctttatttagagctttttttttgaaaatgcttttgttattaatttattaattaattttgttttggtcacagaatattttctgcttgattttagttgttttaaagttattgagacttgtctgatagaaaaacaatagttaatctaggtgagtagttcatttgcactgaagttgttggatgtggtgttccataaatgtcagttaggttaagtttgtatgtggggtttttaaaaataaattaatcgtatttttagtgggtacataataggtgtatatatttataggatacatgagatgttttgatacaggcatgcactgtgaaataattacatcatggggaatgtatccatcctctcaaacatttatcttttgtgttacaaatcaatccaattatactcttttagttatttttaaatatacagttaagttattattgtctatagtcacactgttttgctatcaaataatagctcttactcattcttttaactatatgttttgtacccattaaccatccccaccttccacttaccctccaactacccttcccagcctctggtaaccacccttctggcaaccaacctcttgtccagtgttggaaaacaatttttattgtatatttattcctgtttttatttatggtggaagtgctagtaccaattactctctgtctccatgagttcaattgttttgatttttagatcctgcaaataagcaatttgatttgaatgttccttggtgtgtgtgtgtgtgtgtgtgtgtgtgtgtgtgtgtgtgtgtgtgtgtgtgtttattctgcttggatgcttggagttctggtgagattgcaggactctcttcatctgtctctcttctctcaacggtcacagttctgccctgcctcttgtccagtgtttgaaaacagtttttttttgtatatttatttctgcttttaagttatttattggtggaagtgctagtaccagttcctctgttatgaccaggattaggagttcttcctattaaaatttaattttttttccttttaaagataagatctgaatctatgtggagataaattttgtgcataatatgagttggcatacaatttcatttttaaaaggttacgaataagcattttaccacagttctatttatccagtagtcctttgcctaatgatttatcatgcctcctgttttctataggcaaattttcatattcatatatatgtgggtctgcttctgggttctctattttattgtgatggtcagttgatctatcactgtaccaatactgaactatcttaatttctatggcttaataataaatcatataaatcatattatctgttaagttgggttctctctcccagttcttcttcagaaatgtcttagctattcttggctctttattccctccaagttccttgtgaaatgttgcttttttgattagcatttctttggctgtatagaacaatttcagcgacagttgatatccttaccatattatgtcttgttttccttgatcatgggttaacagttcattttaaaattctttaatgactttcagtaatttttataacttcctcttacagatgttgcacatttttgttagatttatttgctattgtaaatgctgtcctttaaagatgttttctctaattgtttggtgtatagaaaaacaagtaacatttatagagagattttatatttgtttatctaaattcatctcttatagctaatagtttttctcaagattatttttgtttgttttatatataaacacgtaatctgaaaataatatctcttaatttcacatatctaattcttaggtttttttccctataattgtatattctagaacatgtagtataatgttgaatagatttgttaatattgaacatcattttatgttctgattttaaagcagttgctttacattttcccacttatggttatgtttattaaatgtactttgtagatcccttttatcaaaataaagcactttctttccattcctaatataattttatcataaataagatattaaatattatggaaagttttctttgtctctgtgaggtgatgacatgggttttctctattaatttgtttaacaaaattcataaattctgttgtatttagttatttagaatttgttttaaagatttttaacacttttatttagacattttacatttatattgacaaataaaatgaatagtcctgtaaaattttcttcttgaataatttttatttcttttcagatcaaaattatagtggatttataagacgagttacagtatgctccttttgcttatatttctaaaaagaacatgcatcttgtaaatttagtaaaaattgcctatgaaaatgttaagaacttctttgtgggaaaacctttaattcttttaatttttttcaaaagctaacagaattttcatgttttatttcttattgaattattttacattaactttaacaaacaaattttctaacttctaaaagttattagcataaaggaattaataatattctctcatattttagtttttactctgttgttaattatgtcactttttaaatcataatattgtttgtttgttgtcactctttatttctctctctctccaaatcaataatcccagaggtttgcctattttattattctttttaaataattgacttttatgtatattggagtctttctattttaacgaaacagctcaaactctgtagccagattctggctccagcaattactagctgtgtggttctgtgttaattacttaaactctctgtgcttccgtttctatctctgtaaagtgggaattatatccacctcataggttgttatgatgattagaagagttaataactgcaaagcactcgtgctgcctgacacatagaaagtaatatataaagatttattaagtaaataaataattgtgttaatttctgtccttatctccttccttgtatatttttgaaattaatgttactctctttatagattcttaggttttgcttctcttctaatataagaattggaagttaaatattttcctcgaattaccacttttgctatattctataaatttagctatgtggtcatcgttttggggttttgttgttgttatagttctagatggttttgaactatccattatggatttttctatgatcttggagttatttacaagtactttaaaatttttctctatgtaacaatatcttatgtttttgtttctatcttgtaacctttggttaagaacatagtttgttcttgtttagtatgtaatccagtttcgggactgtattataaatgcctgagaatgatgtgtgtttttatattgtctgatacgcaactatatgctcattaaattgtgttgttcacatcttctataattttggccattggtttgcttgaccaatgaggaagttccttagaaattactcacttaatagagttttagagttttttttttgtaattctatatgtgtatatcttgtgactaatttattaggcacatacttgtttagacatgcatgaattagatatgtgtttttgattcattaaatgctttcaacattctgtagtgattttctatattccctatactttttaattttgtcttttaattgacacataataattgtgcatgtttatagggtacagtgtgatgttttgatacatatatacattgtataataatcaaatcagcataattagcatattaattacctcaaacatttgtcatttctttgtgatgagaacattcaaacttccctcttctagctattttgaaatatacaacacactatctttaactgtagtcaccctactatgcaactgagcaccagaagtcattactcctctttaactaattttatacccaataaacaacctctgcccttctccacctccccactactctcccaactttggtaaccactattctactctctactcctatgagattggcttttttaagattccacgagtgagaccatgtgacatttttcctgtgcttggcttatttgggttaacgtaatgtcctctaggttcatccattttgttgaaaatgacaagatttaagtcttttttatcgctaagtaatattatgttgtgttgtatgtataacacattttaaaaatctattcatccattggtaggcacttaggttgattctatatcttagttattgtgagtagtgttgtaataagcatagataaacataggagtgcagatattccttcaacataatcatttttcatatatagaagaaaacagttctaaactttgtatggagctacaaaagatcccagatagcaaaagcaatcttaaacaaaaagaacaaagctggaggcattacactttctgacttcaaagtataccccaaagcaatagtaaccaaacaggttggtaccaatgtagacatggacatgtagaccaattaaacaaaagagagagcccagaaataaatacacacatttacagccaactggttttcataaaggtgccaagagcagacattagaaaaagtagtcttctcaataatgatgctggaaaacctgaatatctacatgcagaagaatgaaaatagacccttatctcttataaaaatcaactcaaaatagattaaatactaaaatgttagacccccaaactatgaaactaccagaaaaaaatatgggagaaacacttcatgacattggtctaggcaataactttttatgtaagacctcaaaaaaaagacaacaaatacaaaaatagactaatgagattaaatcaaactaaaaagctgcacagcaaaggaaacaatcaacagtgaagagacaacctgcagaataggagaaaataaatatttataaactatgcatctgacaaggggttaatatgcagaatatacaagaagctcaacaactcaataacaaaaaaaaatctgatttaaaaatgaacaagagatcttaatatgaacttctcagaagatatgcaaagagacagtatgtatatgaaaaatgctcatcactaatcaccagggaaatgcaaatcaaaaccatagtgagatatcacctcactccagttagaatggctattacaaaaaaaacataacaaatgctggtgaggatgagtagaaagtgaaattattttaccctgttggtggaaaggtaaatagtacaaccactatggaaaacagtttggtgtttcctcaaaaaactacaaatagaactaccatataatccgacaattccactactgtctatatattctctatactgttttgccttaatttctatattgtctgatagtgacttagtttttctttttattagaattgctttgcatatctcttcttattaccttcactcttaaagcctcagcctccttaaagcaaaatttgcaaagaagacatagcagatattttttccaatcactgccttcaaactgacaataatatttattgtgattgttaagaacttaaaatagagctaccattcaactcagcaatcccattgctgggtatatacgcaaaggaaaatagatcattgtactcaaaagacacgtactcatatggtcatcaccatgtattcacaacagaaaagacatggaatcaaccaggtacccatcaatggtggattggataaacgtggtatatgtatatactgtggaatactatgcaccactaaaaagtatttcattggccatggaatgctatgcaactataaaaaagaatgaaatcatgtcatttgcaacaatatggatgaagctggaggctataatgctaagtgaactaacacaggaacagaaaaccaaatactgcatattctcatgtataagtgggagctaaacattgagcacagatggaaagaaacatgtgttgtaatagacactgtgggctgggcgtggtggctcacaccgtaatcccagcactctgagaggccaaggcgggtggatcacctgaggttgggagttagagaccagcctgaccaacatggagaaaccccatctctactaaaaaaaaaaaaaaaaaaaaatacagatttagcccccagtgggtgtggtggcatatgcctgtaatcccagctgctcaggaggctgaggcaggagaatcacttgaacacgggaggtggaggttgcagtgagctgagattgcaccattgcactccagcctgggcaataagagcaaaacttggtctcaaaaaagtaaataaataaaataaaataaaaataagtacagaaataaataatagacactgtggactactagagttggtaggtggtgaagaggatgtgaattgaaaaaccaacaattgtgtactatactcagtacccgagtagtgagctcaatacccatgtaacaaacctgcacacataccccatatatctaaaaataaaagttgaaattaaaaaaaaaggaaatttgaaattttgatttaaattatccagtgttttgaggttttttaaaaaactctttttcaataataagaaatttaacagcttcataccatatcatcctgctattctctttcattcccattttggtttcttatatatacactttatcctttccatttgggagtgctcttagccttttaaaagacaaaataaaattttccaggtattttatcactcctacttcatgtatctcctgcagcatttgttaggtttgtttcttttcttatttggatactttatcacaaagtctttctaaaatgggtcattgttagacaaaaccaatgaagccttccttgtatgtctgaaaatatttttatgacgtttgaaaggcaatttgtctggatataaaatttcagatttaatgttcttttacttaaaatgccttaaaataccttactccattgtcttattgaaactaatgcttctgttgctcttgaaaagtctgatgtcaaattgttctgaaaggttatttgctcttttttttttttgagttagatcattttaactatgagcttaaattatttcagtgttcaaagtcattgcttttctaccatgatttgcccatctagatctcttaattttcagagtggctagattatatattcacgctgtttttccaagcaagccacttttgattatttctgagccttttatatcttgcaatgggcttcttagtccggaatgcacttcttgtggcattacataagttggagacatttactcctttctgttgttgtttctagggtataaaatggaaggtctgaaataaagcagatttttagttaataccattttttctctgtaagaatttgttatagtatgtattctttgtccaattaatattttaatcacaatatgtctaggtttattttaagaactttgtttagagtgtgataagtccctttggcttacagttgattattttgaaattcaaaagtatttctccaatggtgtcttctttgagcctgtcaaagttttgtgggttttctggtttgtgcattagttttcccagaattatctgtgattccagctttgatctttattctctattctctccacaccattccccttgtccttgtcattgctatctctgaccattcctttcacattgtcaggaagagaaggcttcccatgactgatccagtcttttcttcgtcaattccaatgctgggattagaggtttggttttgtttgcaaccctcccttaactccccagctccccttttaagctcagcttgtcattttttctgtctcttcctgtgactctccatctcagtctgttttcttccttcagttcttcataacagtttcattataaacatgtcctctgaatcatttggaagatgttgtttactgttgtgtgcattgttctacccatggtcactttctctagattgctcagcaagcaactgcaagccctgctgtaagatgttgagattctttgtaatctgtcttggccaaatgtgctttgctggtgggcattatgggtgccaggattcgacgtgccgttgcctgtctcctttctcctccacttcctgttttctgtcttcctgtttcctggtaattgttttccctaaattaatttagagcattttctgaaaatatgtttcagggaacactagttcttcaggatgtgtatagatgataaatgaaaaataaaaatgccttgtattcaagtgcatttaagaaatattgaattaaacaaaatcattacaggattgtttactaaatggcttctgagagcctttgatgactgtggctttttgagataggactagatgaagctctctgaggtgcgtcttgtaagactgacatgctgcagaacaccttttagaatcttttgctgtcatatgtttggggagatgcagaaaatggtctggctgccccaggaacaggaagcacacagtagaggaattgctatgtactattcaatttgacataaaccttgggcctccaatttcaagaacaagcaaagaaggaatgaatgatgttagaatatccttctgtggtgattcagagtggcgaggctgtcctgtcttttgaacaaaagcataggtagtccagtgattatatttctcgatccatatccatctacctatattcaagggaaattcctaatatttacagtgggatgactgtcagtattgtcttcatcttttttctatattttcatcatttctgtgtctttataaatatttagttagaagttgggggagaatgtgtcatctgccattttcaactggagacctatgtaaatagtgcaagaggttggtaagtaatccaccttgaatttgctgtgtctttcaggcaggaaaagcaatcacttggcagtatgtcagcttcacacttctacatcagtgtttgacctcaagggcatggctatactgtcttatgattacaggaggcaaatgcagggtcttatctccacatcagctgcctttacatcacttgggtctattagcacccagtggtaaatactactggctgcaccgcaggcactggcttagaagtaaaactttgaatttgccattgccattacttaacccccatcaaaggtagattgagagaaacaacacttttagtagattacctgacagctattcaatctgtcaatcctttggacactaacgtttataatcagcaagattcttccagtggagaattgctttcctctgtgaagatccatttaatcaaatatttttggtgtgatgtcactggctttcattcaagagcatgattagaaacacacttataaaattcattattgactttattgtgaacatgatcctgaaaacattcactgcctgacacacattttctctttagcaccgatgctctgagattcaatctcagggacggaaatagctgtgcttgtttttgtcctatgttataaatcatataaatgattaggttactgatcatattaagcagctaaaatgatggataacagagttgatatttaaatcattatggcaggctgggtagaggctaaccaaataacctcagcagtggaaaatctacagccttcatttgggtaaaaacaatccattgaaacacctgttctgacagagagattaattcagcatttccaaaagtgtgctcggagatgctgtccttcaaggagatgcttcttgaaggaaagaccccggagagaactaagtatgggaaatgctgcatgttaaatctatcttatcatgattcacaatacacattagcatattaaaagtctgtagtaaagaaatctgtttaattctgttgtttccagtttttcttcctaaattcatttaatgcagggcttttgttcttgttgtcattcctggtaggacccaggactatcccaggaatgctctgcagagttcattttagaaaatgccaggttaaatcattcaacctaagaccagtgagttttccttcccactgttgattgattctcactataataatgcttttattttttcatatagttttcattacctttaccatggtagtaatagctatcatttgtggagtattttgtatgtgccgtaccttgtaaatgttactatcagtgagcgtagcagagatgccaaatggtgaagccctgcagagaccatcagaccctgaagaggctggaaaactcacatgatagctgttggtccaagggcagaactggattcctccagtcatgtctttcctgaccttcttccaggcctgggctgggttatgcagataaagttatgagtaagaaatatggtctttgtctccaagagcttaaaattgagatcactgacagacaatgcatgtaagaggagctgggtaagagactccagaagagaaagtgattgcttagtggaggttcaagtgcagcttgattgcggagagcacacctgtgctgctggatggacagcagctgctaggtgggggcaggctaaggatccagcagaagatgcaccagcagagtccctgcaggatgccactcaaggagtgcacatggaagtgccaggagttgcttctggttgaggcagtggatttcgcatggctggatcatggaaccctttgggagaggaagatggaaattggacgtggaaaggcttcaaagcccatcgagagtgttgagctccagaaaggaggcatgcctgcactctggagctaatatgtggcacttgccagaagttgtatcatgaaaaagctaagggagggatgggacaagggtgtggcagagccctgaagcaggtactgatgacatcggagtaggcatctgacttaatctgaaatgtttcatgccttcctcactgccatcattgtgacaggcaagtgctcctgctgacacttctctgtctgctctgctggcccaccttctcagagccctgtaagtactctgacgggaactcagaataagggtcattgtggcctactccctgcaggactctgggtgtcatttccatcattccactgggataccaggaggaagaggcttcgagcttgagaggaagaacacagcttcctgagaggtctggagtggccctgcctttgaacctgccccatggatctgggtgcttggacagagctgcagcagtcacttcatttagccagcattgtgaggagtggaaagagagagaccaggatcctgaggccttcggcacctctcagctcagatctcaagctggattcctccagagtcataaaccctatatcctgccagagaacaaatcattccagcaagaaagaggattctggcttccagtgtctgatgacttatgaagtgcagccaagagtgaaaatcattttaaaaatattgaaaggcacctcgccagggctccctccactggtggaaatatgaatacaggatttatttgaggccccaagtgctgtggcatcatccagagatggggacaacactgtctgcattttagagctgacagctacaacttgtttcttcctgctgctgtggctgcgactgctgccaccgtcaggagcttcgagcatcagggcggatctctggtggcactggcagttgaggcataatccttcaatggtgtagatgatggtttcagggaggctgaggtcccaggcctgtggcaggaggatttggggaaagccatgctctgtggtttggccagcttgggtagataacttaagttatgcactagctcatgaatacacttaggcttccagaacctaaggtgaggacactcttttggactggctccctggcctcctgcctgggggccccagggactcagctgcttctcttatttctgacactgcatcttccccattggaccacagcccagccctctccctatgccccctgcacaaaagcccagggtcccctggctttgtctcttccctaagctgaactatttgcttttcatctctgtctgttgttttataatctcttctttgaactcttgtatctcttcttagatttctttttccttcaagagaccatgttctctgtaacttttttgagactggggagaatatttgcctgaactattaatcttttttcccctaagagataattccttgtgatcgattgttacattttctttatctgcttttctccccatgctggcttctccctcccttactcatgatttggggacattctgttcatatatatattgtcactttctttctggttatcattcaccttcaaagagagctggctccctgtttcagaaagtgtagggagggactggggaccagggtcaggagcttgctggggccgtccttggcttctgtgagaattggtgagttctctctttccaagtttttgattcactttgtcctggatgtgtatctctccataattttcaggattcaaaatggaagggaactttcagaaaattcttctaagatctgcattgcgccagtcagggttttggcctctgccttcaggtcctgtgctccatctcgccatggggcatctttcatggcctgggtgtggctggaaaccacaacacagtttctgccttgcttggcctcctgttggatttgggggccaacctggactcagtcacgtcgtctgtgggctccctgaaatgctcttatctgaggacatctgtgttctgctcggacctgagctgccaggtgggtatcgatattgggtgtcactgcctgtctggtgtgcttctgtcaccatgggtggccatcgctagggatgaagtcactcgttgtctctgggaaaggcaggattagaaggggagtagataaccatggaggcagtagagtgtgttgcccccaggccctcaggaaggctagaaccaaatcccagcaagtttctctactctgctcagagagagcggggctgtgcctggtctctaaagagcagaggagctggggagagagggtcctgtgcagccaggacaagggcttggtcaaggcacttgagaggttgtgaggagcgggtggttgagaagccgggtggccctgcacagtcagccactgctgttctctgtctcagatgcccaatcatagagcagggaggtgaccattctcatatgcacctgacccagacagaaggcgaggggaccaagggcctggctgctccctgccaggaggctcctggtctgactcaggacagggcctgccccaaacctagtgaccccagcatcccctggtgccccatactgacatggcctgaactccacacccttccccccactccctctgcccagacaggaccttcctttgatagaaacatccttttgccccactctgaatctccttcatcatctgcctgtcctgcagtctcctcacagatgcagaccttgtttgtttctttccagtttccctttcccaaggcctgaaatggcctctgggtgtggagccaggtcccctgaggacaattgcctagtgacaaactgctggggcttggcagcctctgtgtcatctcatttaatcattctcttgttccgtctatatttattgagttcctggtatctgccagtcatggattcaggtgctggggaatgacaggggacgaagggaaacacagccttgtcctcccacatctggggctggccctcacccgctttggtggacaggctcagtcatgctggagcgctgtgataggagaggtgggtggacccaggaacatgcagcagtggtcccagcctggctggaggaggatgaattgcccactgggaaaagcttccagacaaagtaaatctaagctgaggccagaggcagagtcaggaaaagggagagggctctccggagatggaagagcaggtgtggatgccaagagccatgagggcgggtgctgccactgcagaacttggggctcttcagcctgggggaagccagagggtcccagggcctgatcactcagacttgcaaactgcacttgtgtttggactgtaggtttgcattgaatgagatcacagtgccacagtgtggggatgttcaggacccaccccctgctcttggcctctgctaccctgactgtgaggcccctaaatctcctgggttcctgggggattgtcccatccatgggcagttctgaagccagcctggttccttcctctcagctgtgaaacctgaaagtgtttgctgctttaattgtggcaaaggaattcataaagctacagctgaaagggcatcctctgaagcctgcctgtgtcaccagaggggctgtttaataataggaagcatacttggatctgggcactgcacagggagctttgagacccattttcaccctaagaggtggtctttcttccaagctgccatgttctataaattcaagctgagacccagggagagagacacctctatattatccatgattctcctggatagtgctgcccagtctggagtgctcacaggtcctctccacactgcggctgctctggcatcttccccagggccctctgggtgggcaccagcctgcacacggatggcggtactctgtgcagtgtcagctttggcaggtgtcttggctccagagccagctctgtggttcctgcttacacagtcacaatcctgaaatttgaaaatagatcataaatagacatgtagatgacctgaatccaagcagagggggcaccctgggggaagaagacaaagctcatttatttatttatatttacttatttatattctgcctccttcccgaaaaggatttctgacagtttacagaaacacttaatgtacaatgggaggtatcttttgttttttttccctcttaatcaagaaatgggggaaattagggcaaagagaaaatgagggcagagatgcaagatgaaactggtggaaagctaagtatacaaatgcatgtacccaccctacctcccactgaccccgagttctctagcttagttttatttctcagccaagtcctaacttgggctgacatctccaaagcagctgaaagccctcctggctggtgcagtctggtgctcagcaactcatctgcgaaggacttgattagttgctagaggtcagctccagacactccatatgtgcctgtgcacctccaactagccacagtgaggaggcaaacaggtcccatttcacagtgcaagactttcctaacggaagaataaatcagtgacccagaagatgacgagacttcccagacctctactcaggcctgaaaaagtctgtgggtaatgacttatgtgtgggacaattagggtttgcctgtcactgtggagtaaattcatgaggttggccaagaaaacttcactggccccactgtgggccagccacattggttgatgttacagataagaccgtgggcagacagactcatccctgctttaatggggaccccactctttaggggagacaagaccataagaaagaacacacctaaacataataattaagtgctaagtaggaatagaggggcttccaaagtgtgctttgggagcatggactgcggacaaccgtgagcctcttctggccaggctcactgcgcctccctgccttggccatgttttataagaaaagtttctcccacagagaaagagcaaaccatgaaaggaaaaggctggcaagcatctaggcagtcaataattcctgattttttttccccctcattcatcagctcttaattggtgtctgctgtgtgtcagacattctgctaaggggtaattaaaaggcaaaataacttctttttcttttcttttctttttttttttgtgaagtttatagtctccagagggtgaccgatgagttagcagatccttgtgatgtgctcagtattttgcaggggtaacaggagacaagagcaaagagcggaaccagggccagaccctggggagggatttggaaatggattctgtgagccactggggaccttctcagtcccaggagcagaagcatcgggagtagaaagaaaccggagagagggagtggctggtggtgtgggggcccctggctgtcagatgacagcagggcacagcagcagagaggggcaaggcggggtgggcttggcagcagacccacccatttaggccggctgggtgatggtggggatgcaactgggcagtgtgctgagctgaggatttacctggctccactgtggtccacacgagtgggtggtcctgtgtgtctcagaagcagtggatgtcacagagctgggcaggctcttggaagggaaatggagctggctgggcaggagacacccacgacatcagccccttgttgttccctcccaggattcaaagcagagctccagttcctgtgggagggatgagtgagaggaatgaggcctacatttttcaaatccagcagggaggtgggtgcccagccccaggacatggcaggagctactcaggccgctagcttcacccacaggacctcttatgaactgggtccaggtggacagcagactcagaggaaaaagcagagtgcatggccaagatggacctgaggacagagtgttcagatccaggcaatgaggatgtcagcaccagtaggcccaactggatacctgggagtggccagggcaggggcaggcacatttaccaaacccttccaggactgtcctggattcactatgtctgtgatctcaccaccacactgcatgaatgggaatggtctcttcagctaccaatgggaacaaggctcagagagtgtataagtaactcactcaatgtcacagtcgtcttccatgggtgctgtgctctaaccagggctgcaaggcattgatgggagatggtggatggcagctgggaggcagagggggagccctggggcaagccccagccatggctctgcccccagctctcacaggtgtgacctccaggcaggctggagagaggccccatttcttaatggctggtttattttcaggttgaaagcttctccctcccaccacccctcctccacgccctgccctttgcagcctgggccctgggaggccatagtgacacccaacactcgcagcaggttcattgccttctgcacaaatctccttcctatcagccgggtcctggcggggggtggggcatgctaatctaatcggccctttcccatctgtaattactgtaatctataacaataattacagtccattttattttagtgccgcttatctaaatgtggatgtgcactactgagattgccaatagaaataagcccctgggtgaggcagcagggtgggagggatgtcggggagaaagctatgccttgcgggcccacgtggttccaatgtgctcctctccagccctttgctgccctcctgaggcaccctgctgccctgtggagtccggcatgcctgcagggggtggaccactgagcaaccaggaaagagcaggggttgtcacatcaatgctagagtttagtgacttccctcggaacaggttatcttgaatcctagagccagcatggcagctgctacaaacccttttgggaacagggatcatgccctcagcgcccagtttctcagatgccaagtgcagtgtctggtgtgtggttggtgcctaatgagtgcttggtgaatgatgtagaaatcacactaaaatcatatcgtgtcacttaggctggctattgattcaggcagctttcccttcatgaatcaggtctcactgcctctgtaatttggaaagataactacttgggggaatatcatgaaaaaaattcattttatacagcatgatgtagctgggctagagattgtgtgtgcatatgtatgtatatggtgtgtatgtgtctgtggtatgtgcatgtgtatgtgtatgtgtatagtatgtgtacgtgtgtgtgtctgtgtagtgtgtgggtatggtatgtacacgtgtgtgtatgtggtgtgtgcgtgtgatgtgtgtgtgtctgtggggtgtgtgtagtgtgtgggtgtgggggtatgtgtgtgtgtgcatttgtttaatgcactttgggctgctgttgcctgttcttctggtggaggagagccaatctgtctttggttttatcctgagtcacataaagttcctgatttcaggtttgggagtctgggggtggagatggctgtggtggtaaagttgggtgtaaaccatttattaccggggcttcaccatgaagtccaatgaggctgctttactgaatttactaggtccctggaacactgaaaaaggaagtcagtgcctgtccttggcgactggaggagacagatatttcagtctagcctagaagccttagactccagaagtcatgatcccttcaatatttaaaaacagcttgagatttcatccagcttatggaggggaacccaaagcctgccacggcagagctgtggtcattctcagggaagccccttcctagtccccacttttcttgtctctttccgcgtccatggaattcatcttatgattattttgcttcctgctgtgggtctgtttcctctgctttgctctgaaccactgtggaaccaaactcttttcctttgatttgtaaaggagcttctaacacagggctgctgcaacagcagaatttcagtgaaggtttggagtgttcagagaccagcatagtgaattccttacctgaatatttagcctgtaagtttaaaagcatttccatcccgttccagtttatttctcattcgtgtaaaatccaaaatgagtgttcctgattgctagggtgcacaagtgtgtgcatgtgcatgcgcctctcagtcaggccaggccccagatcaaatgactggttcagaagccatgctgggtgacattatgctatctacatacaagggagagcatcggggatctcctctgcaattgtgtagccagacttagaagtgtcacctgtcacatctcattgagcagaactcagtcacatggccatggggacaggaaagtgaggctgaaaatgcagtccaattgtgtgctcagagaaaaaaaaggaatcttgataaccagtgaaaacactattccatagttagcccttgtgtttaccaaatgtttcatttattttcgctcacatagagcatgcacacctcgtccttaaagcagacaaccttcaaatcccacccagcctctagatccattcaaaagcccagaacttctggactccatcagcttaagatgggctccttgctgtactgtgactcaggagcttaaacaagcaaactgatgctcacggttgtctgcagtccatgctcccaaagcacaccagacacggtcctagaattgggacaggataaatgcagtaagcatcccacttggtagaagggggaaagggagatgcacggccatcattcagggcgttgctgaattcctgggaagccccatgagcacattagccatggcggtggacagagtgccccggacagactctagttctgtcccctaggaagaactcccttgacccattgtcctctgtggcctctgatcctctgtctagaggtctgtactacccattagcctcctggacacacctgaggtgcatgctgtggagtgtttatgggcttgaggattggtttatgtagtcagagcctcagagatgagcaaagaccccactattgaaagtaaaagttctttaatttacatctggcatgcttttaacatcttgagctagatgattcctgtttagaacctcaaaataattcttgcaagagaaggttcatgtttcagttttcttaatatttacattatttcctttgcaagatgttccccagctcctttttaatctgtagcagattttgctgaaggtttgacatgttggagagtggttacatcacagccccacctaggaaatcacgaagaagctgaacattacatgctcttgttcttaaaaggccctgggccccctgatgccagcgatatctcccaacctcaactaaccaataacccccacatgacatgcagcatcctgggagtggccaggctatctcaaagaatgctcttctctgggtactcttgggaggttttattttggctcaagtaagcttctggtgacaacagctttatatatttttttggagtaaaacaattctggccatgctggatgagagggagttttgggcaggtccctgattgcctatttgtctgtgcactgaagcagactcgtggcagttttctaaagtgatccctgttcccaccagtggtaatcctcagctcacctcatgacacaaggaagaagtgtttttagcaagatccttggctcctacaaaggtatgtcattttcattctggtttattttctgtgaatcctcagaggttagtcctcccctggcaaccacaagagctatattcagtgggtttctgggcaatgccacgacagtcctgagctcactgtctatctttctgtccataaaatcagattcgaggaactccattcggtgaggattacatgaaggatgagaggtcttgccccacttcttgatattataaacctgtgtgtggtcagtctctctgtcagagagtagcgccttcagatgcccagccctctctgcacccttggcagaactggtttgagcaccttgcactttacctaagaaacagggtctgggaagcttcttgtcgccttcattgcaagggtgctgctagcgatgctgttgtccactttgcttcacagagtctggatatatgatcccccgggagacagtcttttctaattacaatgccaaaaacagttttaatccctcagattgagttgttggcacttattctctggggatggtgcatttggtgatgaatagcatttccctgtttgtgccaactgtgactcctaggaggctgagaagaaaagtgaggcccagctgttggagacgtggagagatcatctttttaggcatttctagtgccgttctggctgtagtttatttccatccttattcattttctttcttcttttgatcccatgtcaatgtgtgtcttttattgcaattaactgggtcagctgcccaaaattcctcctggaagaagatttagacgtgcacgtacactaatttgtacttgaatcttttctagaatagtctctgaggcccatgtgacccagtcccctgtgacatccctggctccacagcagctgccctggcagtattgcactcattttatgcccaccaggcatgcatctacgtcagggcctttgcactcgctgctccctcagcccagaatgcccttcccctgatactcatttgccttactgcccccaatctttcaaggtttttactcaaataactcttcttcaatgagattcttttgttcacttaacatttcaactctaacacttcccattgctcatcccatataacacctgtattagactaccttcactaaattgtaacatataagacagcagtgatttttacttgtttttttaattgctgggtccccaaggtttagaacagggcctggcatgctcaataaacatttgttgaatgaatgaagaaattctgttttcaagctgtcagtagacaatgatactgcccgtcctacagagatctcataaaaggcattgattgtcaattttccaaacatttccttgcatgatgttacaatgtggattctgattactgtgtaagtgcgtgtgtgtgtgtgtgtgtgcatgtgcactcacatttcttgtctgagggtcagttgttaagtgtcgtaattggtattattgctgttattgtgattttgggctaattgcagtagctcccagacctggctggctttgtaaacattttaaaaatgttatgaaattattatgagaacattaatttggatttattgtaattaaactttaaattttttgcctttaggaagattaattttgacaaaaaagactaacaaaaatagatcaaaccaatgttaaactgttgagaattcctggcctcctaaataaccattgaggtctggaagagcttgtcagggcctagtgattaagatgatggattctaagcccagacatttttgtgtataaatccaggcccagcaagttactgactgtgtgatcttgaactagtttttggtttttttttttttcaaatgtacaatatatctctctttcttcattggaaattgaaggccatgatacttacttcacaggcttatataacactgtcctctgtgtaaaatgcccaacatgaggccagccatgtagtagatgctctttaaatacagattttactcaggaggcttgagggaatgagttagcatttcctgagtcacatgctgtggtctgaaagtttgaccctcagtcacccacttgttacctacgctccagcatcacacaggcattttatcatctcaaccaccacgtttgcaactggccagccactgctatactgcagctcatgtaatcaataatgttgtattttacaaaagtagattattcatttgtcagagacatactacaaaaaagtaactatatggatttcagggaacaaaggattaatttctgatggagctaatcatgcttatgtggcatagtgggagcacgcagagatgtctcaatatttgaagggaaatgttcttccccaaatgatattatgactcagaagtccaggggaattagctttagtctccttctagcagaggaaaaattatccttaatttgatattgattttttaaaattgggttctgctacttttactttccatctgtgagcagagattcaaatgccagcttttaatcctagaagcacctacttcatttccccttctggttggggagatcaggcgagccctccaaaactctgtagagattggaggaaacttcatgtaatagagaaaatcattccttcccaggagtgggctcctgagcccagtggctgcttggccctcctttggaaactgggtttccaagcactctggtgttcaccatggacacacccctgggccaagcagggcattttctggtctctctttacaagaccacacttgtgcaattataatagcaacaactatttataaaacactatgtgccaggaagtttttgaatggctttgcatcaaatgcctaatttaatcctcagaacaccactgtgacttgacttccatgattaagcattgatattgaccccattttacagaagggaggcgtagctcacccaggatcccacagcatggcagagtggaaatagggtctgacctgtactatctgcctccaggctgggtgttcaggaagctggctcagaagtgccattgtcataactaaccttgtatgaggcccatggtgtgccaggcatttcgaaaacatcggctcagtactggtaagcagcagccccataggagggattatcatccacatcctagtgatgggggagctgaggctgagtgaggttaagtaatgtgctcaaggtcacagaatagtaattaggagaaacaggacttctgccccgtggtgcaggatgagaaacagggctctctgtaacaccagattataccagttcttctcactccagccccacttcctcctctacctcctccaggtaggcctgggtttgtaaatctgtgggggatgtggtggccattgcatctgggcatgttctgaatcccagctgctgatggctgtggttctggtctatctggactgcagtgcccatggcagcaaggctctgagtggacagtggcctcgcagatcctcctctcctctctggtaaatttgctctgatgctctagggctgggattagacaacgatctcaagatgtcctcccaatgccaagcatggtgcgaggtagagctgctctgccccttttatttcatccaatcttgacttggcactgctgagccttaagggagcacatgacatgggctagtgcctggaaagaagatgggatggagaatctgcatggtgctgcacctgccctagtcatttaccccttccctttctccggcaggcatctttccaacatcccacagactctgctagcatgcaaagccaaccaggtccaaatgcaaaggactgcttccctgcacatggtgccttcgtagaaagcacccatcatttccatgtgtaactttccttttccctttccgtcttcatctccacagggctgcattgccagtgcctgttgtgtgagattaggaggtattagtgactgctcattcaggggcaaactcatagaacatgcctggaaggggcagttaggacctctttagatgatgtaattaacctcgtcacatttctgcttgtagagtggataatgctgtcaaatgctgtccaatctttctggtattcaacatattttgattaaaacagaaaagcccagcctgggccgggagaggatcagttgagcctgtcctttctgatttgcaaaggagtctatcgttacctgggtgtctgtccttctgaaacatctgggagtggtgatgtctgctgggagcacagggcctggcatgcagtagccagtgggtactcagtgagcatctgatgcctacactacatggtagggatgaaaccctggcaggagaactgagaagactcccatcaagttagagagatttcactctcctaaggcaggttttggatttttccagtagagtgaagcaggggaacaaaaattgagtcttgttcccatttgatgtgctttatgtgtttgcctggaggccttcgtagactgagaaacagcagcaaattcgacaaggtcctcctgggccggggcttccgagctacattttccttccttgacaggcagcagagctttttcacccaacttttctccaacagcagcttggttgcatgaacagcatgaagaaataaaagtatttaacttcactgaagacattttgaaaaatgacaacttaaatcatttccagaactgttttttgtttaaaggcttggctgcttctcagacttcatagctgctttcttctccttcatcctcctctaaatattattatttcctggagatgctgtctttattccacactcttcccagctatatctgtctggtcttccatgattaagcactgatattggccccattttgcagaagggaggcatagctcacccaggatcccacagcatggcagactggaaatagggtctgacctgtactatctgcctccaggctgggtgttcaggaagctggctcagaagctttgaaggctttttgtatactttttctgtctcagaagtttctctaaaacaccttgctatgttgtttttactgctgggaattcttggttttctgttgagtgtaagttaaaatacaaatcatcagcacagcacacaggtcaaacttgtctccttgccctgaaattgttttgttttttcctcttcccatgcactagaaagtgagttttccgaggtcaggaactgtatctttttgcttatcacactatcctggggcgctataatgatgagcagaaaagggaagcacaatgaattattttttgggggtgaataccacatggttcctgacaacctagccctggagtggcatttcattcccagtgacacttcattcaatgctgtccccacctcccaacccctgctctggcctacctcttaccttgctgagccacctgttcctcaccttgtcactgcatggccctggtccccatcatgattcccactggagtttctgcttgtctagcaggtgtgccagacacgggttcatctcatgcccctgagctctcacagctgctctgacacttccagagcccctccagggccagtgccaatgctccctgtgtgtgctcctcagaaccccttttctcgtccatgtagttctagtcccattgattccagcttcatcttttatttatctcttgaattccacaacagaacatagtgtcttccaacagatcccatggacaacagaacctgacaccaagatgcccaagaattgttaattaatgagtcttgagatgatagaccatgtacagaaatacatttggggtgtggatttattctttcctcaatatcatccccctagttttaattaggactaaatttctgcgtacaagagtgtctgatgattgctgaatgcctgtctatcactgctgagtgatgttgtgtccttggctgtggtaaccaacattcctcatttgcccaggactaaggaatttcctgggaggtaggactttcactgcgaaaactgggagagtcccatggtcagttcatcctcctatcctgagctatgaccagttgagaagtctctttagtaggcaaaaagcaagtaaattggcaatttccttttacatgaaatcatggctgttttctccattagattgtaatttctatgaagacacatgatgagaacttcaaagaaacaaaacaagacaacaatatgacatgggtctccagtccttgctgtatgttagaatcacctggaagctcttaaaaatcccagtgcccaggtcctaccccattctacttacatcataagcccaggtgtgggagccaggcatcagtctattttaaagtcttccaaggataccaatgttcagcaaagttgacaggcattatggggactcctagaagatatgaatggatttgttgagtggacagtaggctggaggtaggcaaagctcttctggaaatattacaggctgggagaaaggagggcccaggggagagagtggaccccaggtttttgtagcattggcctttgcccactgctaattctgggaacatccccacctccctgatttagatgcccacttattagggcagagggcatggttggtaggccagaggagaaggtgcccagctgtaattatacattaggttggagaattagagaggaaggtggaggtttgtgctgatataggaccctttcccattacattgggaagtaatgcattttattgtcaaatttgctgtttgtttttatccagataatgatttcagctgccaataccacagtttgttgtagctataggtagcaaatgcatttctttgctagcctctcactgtggtctgctttctgcctccctgtgtccccagaaagcttggctagtgagcaagccacacaaggactagcagacttgagattcagtggacacagcagagatttgaggactatgccagaacatggctgttagcttcatccctgcctcactttactcagttcagagagccagtgcccttgcaggccaacctcctctgcgttggcagaggatgttgggcacctggatcaccggtagcatttgcttgttgacatagaggcttgacaatctgagttagggctgcggtcgctgcgcttggtagagtcctccattctaaggtgtggcttccaagcagtgatctccccttctgctgcctcccctcggctgctggctatgtggaggtctcaacacaggccaccccagttcttgccacttccctggagaggtgacctcagctctgccccagccaggaccctggcactgtcttgcgtgtgtttctatttttctcctaagtggagaaggtgggagagtatttcatatttatttagtaaccttttatatttttctctgctatcaattgtctgctctacgttctttgttgtggaaagcatgaaattgatctgagcctcacttctgtcccttataaaaagggttgtttttaggattaatttttatttgacattgcataggtgaagtgcttattcctgggcccataacatcaagagctgcttgcttatctttgtagtcttctcttggagcagcaaaggccttacaccaaccatttcctccagcaggcaagggcatcgtagttaagaacgtggaggtgttgtgcctaggttgggacacaaacccaagtctcttcagtgcatggcttctaactagaccatctggctaactaatgagaccaccaatgcttttttgagtatgttttttttttctgatctcagttacatatatttaaaaaaattcattaggttaaatctgttttgattgttaaactatttgattatattatatattcatgtggtgcaaaaatttgaacaaaactattatatagtgaaagtcctgctccccacccacaaagagagtgactcttttgtgtttagtcctcacttccaccctgcctgaagagatgcctaatgttgttattttctcatatacagttctttaaaccaaataaattggaatagatatttctcaacccccttttcaacaatattcttttacaaaaaatttaaaatttttaaatgatttcaactattattttagattcggggggtataggtgcaggtttcttacatggttatattgtgtgatgctgaagtttgggctacgatggatctcattacctaggtagtgagcatagtacccaatagttagttctgcaacacttgccactctcccctcccttcctcctctaggagtccccagtgtctattgttgccatcttttttttaaattttattttattattattatactttaagattttagggtacatgtgcacaatgtgcaggttagttacatatgtatacatgtgccatgctggtgtactgcacccattaactcatcatttagcatcacgtatatctcctaaagctatccctcctccctcccccgaccccacaacagtccccacagtgtgatgttccccttcctgtgtccatgtgttctcattgttcaattcccacctatgagtgagaatatgtggtgtttggttttttgttcttgtgatagtttactgagaatgatgatttccactttcatccatatccctacaaaggacatgaactcatcattttttatggctgcatagtattccatggtgtatatgtgccacattttcttaatccagtctatcattgatggacatttgggttggttccaagtctttgctattgtgaatagtgcctcaataaacatacgtctgcatgtgtctttatagcagcatgatttatagtcctttgggtatatacccagtaatgggatggctgggtcaaatggtatttctagttctagatccctgaggaatcgccacactgacttccacaatggttgaactagtttacggtcccaccaacagtgtaaaagtgttcctatttctccacatcctctccagcacctgttgtttcctgactttttaatgattgccattctaactggtgtgagatggtatctcattgtggttttgatttgcatttctctgatggccagtgatggtgagcattttttcatgtgttttttggctgcataaatgtcttcttttcagaagtgtctgttcatgtcctttgcccactttttaatagggttgtttgttttcttcttgtaaatttgtttgagttcattgtagattctggatattagccctttgtcagatgagtaggttgcgaaaattttctcccatgttgtaggttgcctgttcactctgatggtagtttcttttgctgtgcagaagctctttagtttaattagattccatttgtcaattttggcttttgttgccattgcttttggtgttttagacatgaagttcttgcccatgcctatgtcctgaatggtaatgcctaggttttcttctagggtttttatggttttaggtctaacatttaagtctttaatccatcttgaattaatttttgtataaggtgtaaggaagggatccagtttcagccttctacatatggctagccagttttcccagcaccatttattaaatagggaatcctttccccattgcttgtttttctcaggtttgtcaaagatcagatagttgtagatatgcggcgttatttctgagggctctgttctgttccattgatcgctatctctgttttggtaccagtaccatgctgttttggtgactgtagccttgtagtatagtttgaagtcagatagcgtgatgcctacagctttgttcttttggcttaggattgacttggcgatgcgggctctcttttggttccatatgaactttgaagtagtcttttccaaatctgtgaagaaagtcattggtagcttgatgggaatggcattgaatctataaattaccttgggcagtatggccattttcatgatattgattcttcctagccatgagcatggaatgttcttccatttctttgtatcctctttcatttcattgagcagtggtttgtagttctccttgaagaggtccttcacgttccttgtaagttggattcctaggtattttattctctttgaagcaattgtaaatgagagttcactcatgatttggctctctgtttgtctgttattggtatttaagaatgcttgtgatttttgtacattgattttgtatcctgagactttgctgaagttgcttatcagcttaaggagattttgggctgagacaatggggttttctagatatacaatcatgtcatctgcaaacagggacaatttgacttcctcttttcctaattgaataacctttatttccttctcttgcctaattgccctggccagaacttccaacactatgttgaataggagtggtgagagggggcatccctgtcttgtgccagttttcaaagggaatgcttccagtttttgcccattcagtatgatattggctgtgggcttgtcatagatagctcttattattttgagatacatcccatcaatacctaatttattgagagtttttagcatgaagggttgttgaattttgtcaaaggccttttctgcatctattgagataatcatgtggtttttgtctttggttctgtttatatgctggattacatttattgatttgtgtatattgaaccagcctggcatcccagggatgaagcccacttgatcatggtggataaggtttttgatgtgctgctggattcggtttgccagtattttattgaggatttttgcatcaatgttcatcaaggatattggtctaaaattgtcttttttggttttgtctctgcccggctttggtatcaggatgatgctggcctcataaaatgagttagggaggattccctctttttctattgattggaatagtttcagaaggaatggtaccagttcctccctgtacctgtggtagaattcggctgtgaatccttctggtcctggactctttttggttgataagctattgattattgccccaatttcagagcctgctattggtctattcagagattcaacttcttcctagtttagtcttgggagggtgtatgtgtcgaggaatttatccatttcttctagattttctagtttatttgcgtagaggtgtttatagtattctctgatggtagtttgtatttctgtgggatcggtggtgatatcccttttatcattttttattgcgtctatttgcttcttctctcttttcttctttattagtcttgctagcagtctatcagttttgttgatcctttcaaaaaaccagctcctggattcattaattttttgaagggttttttgtgtctctatttccttcagttctgctctgattttagttatttcttgccttctgctagcttttgaatgtgtttgctcttgcttttctagttcttttaattgtgacattagggtgtcaattttggatctttcctgctttctcttgtgggcatttagtgctataaatttccctctacacactgctttgaatgtgtcccagagattctcgtatgttgtgtctttgttcttgttggtttcaaagaacatctttatttctgccttcatttcgttatgtacccagtagtcattcaggagcaggttgttcagtttccatgtagttgagtggttttgagtgagtttcttaatcctgagttctagtttgattgcactgtggtctgagagacagtttgttatgatttcttatcttttacatttgctgaggagagctctccttccaactatgtggtcaattttggaataggtgtggtgtggtgctgaaaagaatgtatattctgttgatttggggtggagagttctgtagatgtctattaggtccacttggtgcagagctaagttcaattcctgggtatccttgttaactttctgtctcgttgatctgtctaatgttgacagtggggtgttaaagtctcccactgttattgtgtgggagtctaagtctctttgtaggtcactcaggacttgctttatgaatctgggtactcctgtattgggtgcatatatatttaggatagttagctcttcttgttgaattgatccctttaccattatgtaatggccgcctttgtctcttttgatatttgctggtttaaagtctgtttatcagagactaggattgcaacccctgcctttttttgttttccatttgcttggtagatcttcctctatccttttattttgagcctatttgtgtctctgcacatgagatgggtttcctgaatacagcacactgatgggtcttgactctttatccaatttgccagtctgtgtcttttaattggagcatttagtccatttacatttaaagttaatattgttatgtgtgaatttgatcctgtcattatgatgttagctggttattttgctcgttagttgatgcagtttcttcctagcctcgatggtctttacaatttggcatgattttgcagtggctggtatcggttgttcctttccatgtttagtgcttccttcaggagctctttcagggcaggcctcgtggtgacaaaatctctcagcatttgcttgtctgtaaagtattttatttctccttcacttatgaatcttagtttggctggatatgaaattctgggttgaaaattcttttccttaagagtgttgaatattggcccccactctcttctggcttgtagagtttctgccgagagatccgatgttagtctgatgggcttccctttgtgggtaacccgacctttctctctggctgcccttaacattttttccttcatttcaactttggtgaatctgacaattatgtgtgttggagttgctcttctcgaggagtatctttgtggcgttctctgtatttcctgaatctgaatgttggcctgccttgctaggctggggttctcctggataataccctgcagagtgttttccatcttggttccattctccccgtcactttcaggtacaccaatcagacgtagatttggtcttttcacatagtcccatatttcttggaggctttgttcgtttctttttattcttttttctctaaacttcccttctcacttcatttcattcatttcatcttccatcactgataccctttcttctagttgatcgcattggctcccgaggcttctgcattcttcacgtagttctcgagccttggctttcagctccatcagttcctttaagcacttctctgtattggttattctagttatacattcgtctaagtttttttcaaagttttcaacttctttgcctttggtttgaatttcctcctgtagctcggagtagtttgatcgtctgaagccttcttctctcaacttgtcaaaggcattctccgtccagctttgttccgttgctcatgaggagctgcattcctttggaggaggagaggtgctctgctttttagtttccagtttttctgctcttttttttccccatctttgtggttttatctacttttcgtctttgatgatggtgatgtatagatgggtttttggtgtggatgtcctttctgtttgttagttttccttctaacagacaggaccctcagctgccagtgtgttggagtttgctagaggtccactccagaccctgtttgcctgggtaccagcagcggtggctgcagaacagcagattttcgtgaaccgcgaatgctgctgtccgatcgttcctctggaagttttgtctcagaggagtacccggccgtgtgaggtgtcagtctgcccctactggggggtgcctctcagttaggctgctcaggggtcaggggttagggtcccacttgaggaggcagtctgcccgttctcagatctccagctgcatgctgggagaaccactgctctcttcaaagctgtcagacagggacatttaagtctgcagaggttactgccgtgtttttgtttgtctgtgccctgcccccagaggtggagcctacagaggcaggcaggcctccttgagctgtggtgggctccacccagttggagcttccctgctgctttgtttacctaagcaagcctgggcaatggcaggcgcccctcccccagcctcactgccgccttgcagtttgatctcagactgctttgttagcaatcagcgagactccgtgggtgtaggaccctccgagccaggtgcaggatataatctcctggtgtgccattttttaagcccgttggaaaagcacagtattggggtgggtgtgacccgatttcccaggtgccgtctgttacccctttctttgactcggaaagggaactccctgaccccttgcacttccgagtgaggcaatgcctcgccctgcttcggctcgcacatggtgtgctgcacccactgtcctgcacccactgtctggcactccctagtgagatgaacccggtaccccagatggaaatgcagaaatcacccgtcttctgtgtcgctcacgctgggagctgtagaccggagctgttcctattcagccatcttggctccagctcctgccatctttatattcatgtgtaccccacatttatctcccacttatgagtgagaacatgcagtatttggtcttctgttctggtattaatttgcttaggataatggcctccagctgcacccatgttgctgcaaaggacatgattttattccctttttatggctgcataatattccatggcctcttcaccatttttcttgcagttattttcatattagttcagaaagaacttcttgattcttttttttacaggtacattactatagtctttttgtttgtttacaagtacaatactttcctttgagtgaatagagcatgatttattttaccaacacccaattgatggacatttaagctatttccaatcttctgaaaagagtattgaataaatgactttgaccatatattaattcacaagtgtgtgagaataactttaagaaaaatacctaaaaatataattactggttacaaggatttgtatatgtgtgtttgtgactttgctaaatattgccaagttgcctccacagatgttgggtcaatttctatatctgtcaacaatgcattggggttccaatttccttatagccttgttactgcagtgctttaccaaactgggatttttgccaacctgttaggtgaaaaatggtaacacagaataattgaaaaatgtatttttctttatcctgtatgaggctgtgtatcttttcaaatgttttagaggcatttgttttccttttctgttaatggctagtcttataatttttccagattaaaaactgaattgttgatctgtgcctttcttgtttatttataggagttttatacatcaaagagattaccctttgcattggacattgccaatattttcatcagaatattgtttgtcttttggattttctttttgttattatcatttttttttttaccacttggaaggttttcacgtagtccaattactattttcttcttttatgctctctacattttaaataatttttcaatgttaccttctagaaattttatagtttcaatttgatgtgtttaaatccttgattttttggaattcatcctggtgtattgtgtgttgtgtgaaaaatggattccacttaatatttttccagatggtcatccagttattccaacaccatttattgaatacttcatattttccacacttccttaggggttggtcatggaaaaaacattctcagctttcatttccttttaatcgattttagctcgggatttcctgggaaggtgagaaaactttccaccaaagtctctggggtttgcatttcctgttctgtttggggattactatgcatctcttaactctgtgattttgctttccaagcttttgtggtttgcatcccttgtcaacaggatttttttctgcaaacagcaatgtaaaggctcaatgtgtctaatgtgcctgtgtagtcactatagctgtggcaccagccatagccttttgtgagcagagagctctcaacaaacatctcatgcttttcaacttctgccaaatgattctgcatcaggacgggatgggtgcagcagccaaaagaaatatcaaaggtggaataggagccacatttgggaagtgtgtgcatgaagtcagaggaaattgccagctgtcaagcatatgaaaagacaaaaagacaactgaagaaatgcccaccgctttcccttgaattcctccttgccccttttccatctccctgacccagtgactcttgcccatggaatgattaacaacaggcccaaaacttcagcaaaatgaaaatgactcagaactttcaggtcgtatttgtctatctattcatttaacaaagttctttttcccatcataaaaataagcatgctgcttgtatattagatatgctatttaaattatttgaatttttaatgaatatgattcagtaaagaacttgagtcagctaacacacccaaaaatggatcagaaaaaaataactggtggaattgcagcctgggtaatggaggacaagaaattaataaagttggggataggattgggggtgatggtgtgggaggaggataggctcatagaagtgtaacttatatgagtttatacaattgctacatttcgccaacttggctctacatttcctagcggtcaaagtaaaaagggaaatattagctacaactttcataagacaaatagctgtgcctgagtggcccagcttctcctgatctcgagttctgggaataactctgccaaatgcgctaatgttcattcccaagaaattataaaccttattggaatttgacaatgacagacgtggatttgactacaggaaacaagaggggcatggatatattcttggcatatacagaggaaggctcttcccctctagttacacacaggcagggcagatccaggctttctaagacttgaagtgtatgcagtttcaaaggttttactttaaggaaaagaatatgaaattgtgaatgtaaaatcaggtatgaaagtgaatatttaatgagaaaaaattataataaaatatactaaaaaacatgaaaaacctgacagatacaacaaaatcatacacacacacacacacacacacacacacacacacacacacaatcatctgcctttcacacagttccataataatttctcccctgtcatttttggctactctttgatcctctcctcatatgataatccttttgaatttaatgtcccatagagagaagagcaagattatttcatctttcctctggtatggttgattgaaagttttttattagtagttgtttagaaaagttttgtttggtttcttatcattggtaatgtgttgtaaatttaaaactattgtcatttttttttagacaaatctcgctctgtttcccagagtggagtgcagtggggtgagcacagctcaatgcagcctcaacctcctgggttcaattgatcctcccacttcagcctcctaagtaactgtgacaacaggcacatgccaccccaccaggctaatttttaaattttctatagaaatggggtttcaccacattgcccaagctggtctcgaactcttgggcttatgcagtcctcacgcctcagtctctcaaagtgctgggattataggcgtgagccactgtgcccagtccctattgtcaaatttaaggaaacccttccaagtttcttttgtgaggtggaagatttggaagatttttccatggctggcttcttacttggtttatttcaaaccttgtttctcctctaccaccacatacttgtgatgccagggctgcagcacatgtactgccacgacacaacctcacctgtgcacctctgtggtatgagaccagttgagtcagcatgacagcagttaaaatcgtccccctctggcagccagcaatatgttttctatgcatggaagtgaaactagaccatgggaaagtatcccactaaactcagacccaaaacttagcttcctaaaatttctgacagtggatcctacagcagtagatacaagaaaaagtgtggctaacaggaagttgggtggaacagtggtctgaattgattccagttaagttcagattgagtgttctttatccgaaatgcttgggaccagaagtgttttggatttctgattttttctgatttgggaatatttgcatataaataatgtgatatcttggggatgggacctaagtctaaacatgagattcatttatgtttcacatacaccttatatgcatggcctgaaggtaattttatagaatatcataaataattttctgcatgaaacaaaattttgactgcattttgacagcaatgtgttacatgaggtcaggtatagaattttccatttgtgtcatgtcaatgctcaaaatgtttcacattttggagcattttggattttgcattttcagattagaggtgctcaacttgtatcctactttttcaaatattactaaactggagacacatgggaacacattgctaggaccttccctgataatcagcattgccagagcaacaggagggtcttgaggcctaagccagcccgtgcagctaaatctccctctggatgcagagctttctaagggtaatcatgatcacttacacatggaattcagaagcaaataccatgtcctagttgacccattttcttgctgtgtgaccatggactagttattcaacttctatgagcctcagtttcatctgcttgaaaattgagataatacaacataatacaaaattatggggttgttttgaggattaaatgggatatattcatacatcagttactcttttcagcacctgcaaccatcctaaattctaaataaatatcaggtataaagatgtactggaatcctcaaagaaaccatctaaccacttgctttgtcctctttggggcaaagaaaaatccctgctgcatttctgttatatagtctgatgaccctttctattttcagacaagtggaattttaaattaagtaaccctgagttttgttttcaattttcccattctcttttccttgaattgtgtatgggcctgtactatggctgacatgcatgcaatgttaaacacaatgcaagctatgtgcagagtaaactgtagcttcacaaacagctgttttttgagagtgacatgaaggtactaacttagtggagaggaagataaacttgaagtcatgggtttactaacttagactcagaaataaagcccacatgtgtttgtgaggctttcggataactttagaacatgtgcctgtgtctaaccatcatttcctgggccctgtattgtgctggacccctgcagggcacggggttcacctgcagcagcccaggtggctgactttccccacatcaagatgactggttcttaaagggaccaggggaaccttgtccattctgggcttactctctctgcccactttgggcttcactgaggacttgtgaatgctaccaaaaagtgctatgcggggccatttgaaggctctgaatttatcctgaggccctgtggtgagttcatttgccagatgtgcccctacttaaaattccactcctcggggggattctgtgctgccctttgagaaccatcactttgcagggaagtcagtgcttggcagcctagaatgaaactggatccctctgattattgaacacagttgccccttggcctgggaaggatttactgagcattttggtcacctcctgtcactcttcatggaaagactcaccacttcaggggctcatcatcctgttcctgaacaaactggagttttacaggcagaaaacgcatctctttggcttttattaagaactaatattgaaaaatccagcagtctccagagggctccttctctgtggcctcatctgtaatttatctattatttaatctttaaatggagtctctcagagactttgctggatttttttcatctgcctccccacacagagatgaaattatttcccaagtgccttagatcatgaattggtaccttttggaaaggaaaagataatactgtttatgtgcgagtacaagagaattacttcacttgtctgtagtaacactgattaaactgaaatgtcagagctaatgttacagttaataaatgttatacatactcaaatctgtctactgatgattctaacaaatgcagaggacactgcttaaaaataggagggatacctgcatcaccatgtgagtgccatttgtgctgtccatttccagtgagtaaggtaaaaatgtgcattacaaatgagacccatgttggtgatgtctgcaggtcatgttttgtcacttgaagttttcctaaccagataaattgtcacagttatgagaaatcaacataggatttggaaaacatttcctgagataagttgcattatgtaaatcagaaggtagtgggatagagtatgatgagaaaatggagtgtcagacatcagtgtgccaggggctttggtgagaggaagaacaaaagggtccccctacagcctgccctctcacagcctcacaaaagttgatggtattgcttgctcttcctcgtaagagaaaatgtatctgggacctgttatctcagtgggcatccttgggcagatgggtgtgccttcctttattccaagatgtaaaatacagagagcacaagtaggaaaattaagaaaatgagatgaggactgcaaggtgggcagctgacttggggtcactggcaaaaagaccaagactctagtcctccatgcccattctcccagaaatgaagtctcagtttctggagaaggacgtcactcttgctctgaccacaggaggactttgcctgtttgctgtccacccctccattatccctggatgctgtgctctgctgcagtttcccagttgccagaaatagtgtggggtttgtagtcttatacacatagttgcaaatcctagctgtgactttggactaggttttaaccctgaggctactcaggggcctcctgtctgtctcctaggatgattctgctaaatcagtgagcaaatgtgtatcaggcacctgacaagtcacctggctcacaacaggcactcacttcttcccacgctccaaactgagttgatcacttgtgcattgttatgacttcaagacagggggactttcttctcttccccattgccctctctcttcctggtttctcatgtctgtgaaagcctctgtcgcttttttggtcagcaggtagggatagggagctggcagccttttgccctctctctggcacacgcagcagtctagggcttatctgaaaggagaaagctgattgaggcacagttcccacattggggcagactggggagcaactcacaaattcaaggtccacagtagaatgtctgggacatcccagctggcacccccagacaggaagctctacaccctaggagaattctaattcagttggatttaccatcaaatgactgtaacaaagaaagaatatattaaaatgttcattggggatcttggttattataaattacattatttgaaatctcatttagatccagaaatttccagactgggtttggaagctctgaggattagtccttttggaacaatggagtgtcagtgatcatttggaaaagtaattatgtcaaatttaattatcatgcatatgcatttcatcgacatcactgtgcacacccaggagacagtggggaaaggactgctccagcatgagcccttgatagaggaatgcggtgcaaaattgtacatgttgtaattgagtgtcacttaatctgaagcatgatggatacagcgactgtgggtggagcaaatgggaggaagtatttggcccactcagcagatgtttgagatatttgggaaggcttttcaatgttttcaacatattggagaggagcaaactacatttcaagtaggctgataacaatgtttccctgtcttaagcatttcttttgttttctgttcctgtggtagcttcacaattctgaattgcagaatggtttggaataatccagtaaaccgccaaatgagactttgaaagtgtgtgtgtgttttggggggtgtggggggagcatggcatagggactgtctggcagacagaggggccaccatggcaatttgcaccctaaagtgttcagagtgtgttctgttggatgctgaccaactggggacccatagtggttttatctgtctcctggcctctatcccagcttcctcccttaagctggctagcaccgtttagaactccttgtcattgcctcttctttaggggcctcccctgatgatgctgggttaggttggctgccctgcacttacttgcacagcacaacggtgtaattgctaatttgtatgcctgttacctctgcacaccgtgggcactgtgagagcagtgaccttgtccttggcttagcattggctctctagtccccaatgcagcacctgcatagaaagggctcagtaaatacttgtttgaatgggtgatcagaaactggaaagaactccaggagtcaatttctcctctctacacatccctaattgtgctgaagcccaaacaagctgtttctaaagctgctatctttggtttggggacgtgagataaaaccattagtgtttaacacatgacacttgatatatgaccaggagctaactggttagcttctttggagctcattgagaattgtaaaactggaggcaggcactgttgagtggaaaaattgaaatagtgcatggcaagtgcttccttcttcctgggatacccgtaaaaagttactttttaatttgctcagctgagctcagagcctttttgttttttgaagagctggccaagaattcatcaaggactgaaaaaccaaaggctttaacttcaggttagaggtgctgttattgggttctcagtgcatggtgctgaagccacagctcatgggtgtgagtgcagatttgtccactttgacgaaatgccttctgacctgtgttatcatctgagaatcttggtgctttgggtaaagtttgatggccctgctgatgctctggcaacaacattttaccaaagccagggaacctcaaattgctgcagtagagcagaatggctactgaacaggaaatccaggcataattctcactttctggagcccttagggaagataaaacaggaaaattgaggaaattgtgcttgagacactatagaacgtgttgcaaatgtatacttattgttgacattgttgacttctgtctcactagccaatactgtgtgtgtgtgaccagtctcatatgtttttccaagacactgaaaggcttgatgattaaaggatgcagggctctttgtgacttctgttgagttgttatagtttacctggcagaaaatgaatggtggaaacccaaaatgggcaaaaagaaggagctaaattgttttgaaactggcttgtgtgccagggggagtgacagacacattatcttatctactttaatctaattttcccaacaacctagaaagtaggcagtagcactatttccacttacagtgagttgcacaaatcaggccaatgacaataataataacacctaaaatctactgagttcttgccatatgtcaggcatctaataaagctgaacaatataaaattgccatttatataggtcaaaaacaactgatggtcagcacttttcatgtatcttattcgtgcctaaacaaacttaagtcagcagggctgtctgactgcaagtttcctgttatgacaccacctctcactgaggtaaaatagggtgctactaacaaaaatggatgtcagaatgctgtcttatatattcataataacacaactgttaccatcaagagccccactgagaagacttaggcctggagacttgagaatgtaatggtgatatggggcgagagagagcaagtccccaggcaccacactttggggattctctttcttgcatttattctttacctggcatggcaggatgccctcagaggtggaagatacttttgctgtattaggtttaaaatgtcatcactaattagctaggatttcaggttgggtcaatgcagtatcaagcctggggacttaactttatagacatagaattgaagggaaaaatacattttccgaactcattttaaaaatagtttcccttggaaattaaaaccattaaatgtacataattatgcagatcagtattcatgctttaaagaaacatgatttcgccttcacttaatttgtttctccaagacctaattatggattagatataaaaaaatattattttccaatcactgtgcaaatcgccttttaccacccaggaggacagttctctctgattagtgagagttgtttccatgcactgatcagtcaaggaaaagtcagagagatatattccaagagggagttggttgttcataaagtcaaaagaagacaacaagtgtgatccttttcagtaagacagagtggtggggatcagcttgagtggggctccaggtcttttcccaagagcagctgcattcagcacctgaccagactctagggttttaagggtgcagctgcccaaggactggtccagaatccaacagtaaatgtctatggtccatcatactgggatgcctggaaaggagcaccagggttgcagggagagggaaaggccctcagtgacctcaaggggcagccaggaacaaggtggaagacaacacctctgtagtcatcactttgcttcatgggaagtgttgatgccagggacttgattcatgaccaagactcagagactggagttggctctgattaggattataataatggcagggatctccatcatgtttactatgtcctaggcatggttttaaacactttacaaacatcagcttatttaatcctcacaacaattctacaaggcaagtgctattattatctctgttttatattaatagatgaagaattcgaaccacacaggggttaagcagcttgtcctctagtgagcagtgagaatggagcagcttgtctggagtctgttccaccagcttatagtgggaggctctccactgtgctgcctttcagtactagcaggtcactcacaacttgacaagtgccatagatgctctagtacatttaatcctatccatagccctatgaggaagataggctgtggtgagctactattctgatggtccccatcaaatcatacctcccagtacccacgcacttttgcagtaccctacccttgaatttgggcagggctatacctgctttaatccacaggatatggtagaactgatggtgagacactatgagacagtgcttatgatccctggcagtctgcactttgccctctggagaaacccagatgccatgtaaaaagtttgaaaaccctgaagctaccaggctcaacaatgaggagaagctatgtggaggaaaactgaggcctcaacaattaccctctgatgagctcctaaaccacagccccaccaacttgccagccatgtgagtgaagtcaacttggaaagaaattgcccacccctagtggttttccctggctgatggcacgtggagcagagatgagctgttgtcaaactctgtccaaactgcaaaagagtgagcaaataaataaaacaagtgaaagtgattgttgttgtaagctactaagttttgcaattatttgataatgcagcaaaagataattaaaatggttatagatttcactttacagatgaaaaatctgaagttcaaagaggccataaaactttcctcaaatgctatagctagatagtaacagatgcagaaatggaatcaaggagtgggagtgcagaggagcactctaaccaccatgctctactccctctgttggtgtatctgcaaggactgcctcaatgtccaaggaaggtcagcctgtgtgaggctgtgccaggagtgttacgatataaaattcctggcccctgcctacctggcctttctgttctggttggagcttacacttcccttagaatacttgccagtgtagcagcatgctgcaatatttactgaactccaagaatgtaccagaccctttttagttggcttatcattgaatcttatagcaggtaggaatgactgtccccaccttggagttgcaaaagcaggcttggagatttcagtaagatccttaggttcacacagtgtgtttggatggagctagaatttgacctggttcagctcaaccaccatacatagtacatggaccaacttcagctcctgttcctcgtctttagtgtcccccagtaggctctgtcacattattcaggatgctgctgaactctgctcaaagtgagcttcttcccactttcccttagcaacaaggtcagtcacaatcctgtggatgctttgaatgtttgtaagaccacccagatttggtggtctcttattgcctccctgatcagagatcattatgtctgttttcttgtgcatgccaactcccagaatggacagatgggagaattttctgccctcactccacccatgtgcagattgggcatcagatcctctcagcatcctgaagacagttctcacaacagcagcagcagtagccatataagcattcggcttgggttgggccatagggaaaactttccttctcatccacagataatgaccaggaaggtgttcctcagtgagaggcttgttcttccaagcgagattaggtagtagaaccttgaaggggagttgaaggcattgaggctgtgcctgagctcagtagaggagcatctgctgagtgggtgaaccctgccgccccaagtttgccccctgttggcttggtttgcttaccatgccttagatcctatgcttaactcaggtacattttagaaggtagatccttggaggggctatacaaaagcagctgacagactatgagaacattttcatccaaaaggcggtcattaatccttaagctataaaactacactttgcctcagtctccgcattgtacagggaatcagtaatggtgcctacctcattaggttgtcttgaggattagaggagtttatattggtacagtgctcagagcaatacctggcataacctataaaactgttagctcagtgtaagtgacaaatggacagagggccaaatgcctgtgtctatacagtagtattcccttatttgcggtttcagttttcatggtttcagttacccacagtcaaccaatcaactatggccccaaaatattaaatggtaaattccagaaataaacaatttgtaagttttagactgcagtgctgttttaagtaacgtgatgaagtctcactccatctggctccatcctacctaggacatgaatcatccctttgtccagcgtattcacactgtagataatgcctaccagtcggtcactttgtacctgtcttggttatcagattgtctgtcttaggatttcaatgcttgtgttcaagtaacccttatttgacttaataatggtcccaaagtacaagattagtgctgctggcaattcagatatgccacagagaggccataaagtgcttcctttaagtgaaaaggtgaaagctctagacataataaggaaagaaaaaagttgtatgctgaggttgctaagatctacggcgagaacgaatcttctatccatgaaattgtgaagaaggaaaaagaaatttattcttcacagctcaaactgcaaatttacggccacagtgcatgataagtgcttagttaagatgaaaaggggattaaatttatgggagaagaacatgaacagaaacgtgttccagttgatggcaattgggttcggtactatttgtggtttcaggctcccactagggggggtattggaacataatgtatccccctcagataagggaggactattgcatgtgggtgggggttgaaggagaatgggtgctgagggtaggagagagatgaccacagtgagagaaggttcctgagctgttaccagtggcgtccagcgcatggcagggtctcaacatgtctttggcctgtgggaagggctctgataggtatgagtcccacctccttgttttagggatgagatgagggaagttcaggggtcaggggagaggcctgtgtaattcaagtttgttccagaccttttccatctaggtcaccaggaaatggggttcttgggcaagggtgtcagggccccaacacgtgtgcttatggccccagcagagtgcccaggggtgcccgagcggaagtgccacttcaagggctgagaagtgagagtggtaccagctgcctcaggttttctcacgctctcacgccagcagagcatgagcgccctccttggcaatgtgaatttgatgctcttacctttcagaagagtcctttgctttactctgggaatcctggcactcctgcgacttgctttgaccactagcatgtggcagaagtgacgttgcagaagttctggagcctcaagagaccacgcagcttctgttttgttcccttggacgccatcctgaactgggcaggcgctgaagaaccaaggacggaaaccacgtggagagaaaggccaagtcatctcagccggctcagctgaacccaggacctattgatcttccagctgaatgaaatcccaggagcaggctccattagctcattgaactgttagaaataatacattgtggctgcttgaagccattaggtttgggggtggtttgttttgcttcaataggtaactgaaatgcttgcgcaagtttgaccaggcctggagtcctaggaccctttctagcagcccctctactagcctatgaaaaagggccggccaaaacaggcttcataaggaatagtggggggaactagggagaagaaaagactaaaaacccacaggctcatgatcgggctgcttcatattccaagagggccatcctgtaccagaaagactaggctgattcaaaagcatcccaagctctttaagaaaaattgtaacaatgataaaaataaatttagtacctccaatatgccagtcattttatatgcagcctactcttaatcctataaataactttttaaggtaggtaggcattaattccattattttgtgggtgaagaaatagaatcaaagagtttcctgcccaaggtcacacagtctgcaaggggaggaactagaatttgaaccaaagtttgacccccaaacccagcctctatttattatgccttgttgtctttctcttggcccactggatgtaagtcaaggaaatgagaagtttttggggaaaagagtatctctgagcatagtatgctctctttttaccaccattgcttttcatatgctctttctttgatcagtaatgagctttatgtaagtctctgtttggggaaattctattcactctttaactttaatcatatctcactctctttgtcatacctttccctagtctcatatgctcagaggatcactcttttctctgtttctcctcagtgcattctacaaacctttttctcatatgtaactcatgattttaattactttcttttattctatctttctcccttctagaccagacatttctctaggacaggatctatacttcatttctgtgacctgtgcctgtcagtttctggcatgtggcagccttcaataaatgtttgtttaattactgaatatattgatgctttgatagaagaaacaactctgtgaactattgcccacatttgaaaaatgacatttctgatggaagtgagtcccctccccccatctgttgagtgtctgggtagtcatttaggctggtggcatgtgatttctggctttgtatgaagatttcacaagatcagtgctctcatgagtgaaattgtcacatcactgggtgatggaggataaaattagaaatttctttttagtttttttttcttaaaacttaagaaaagaatttaagctttacaatatttgctatgtgcattagcactggtgcttataggggaatggctttgccatgattgcctgatgaccttgtatgtgtccagaagggccatacaagcaaaggcttaaactacagctaatgaaagtcttggtgtatcaccttgcaatccttccggaacacaagaagaagggaggcctctgaggagctgctatgaggccatctcccactccccttcctattccccgtgggaggctgtcctgagacagtttttcattacacttcatgaggtgtgaggctttctgccctacacctatcaggacatagctgtaggctataaaagtgcttaagtgaagtctagaattggcttctcagcaatggagtatcccacaactgaagttatagtaatttagaccagataaagtctagaattggctccccagcaatgggatatctcacagctggagttacagtcaccaagaccctttggttttagtgtcatcttttctggcatgtaggaagacacagggagtgggcatgtttggctattcttcctctctctgtccatataagtaataaactctctgaatccttaagtggcttgtcatctctttaccagccgaatcatttaggccttggtcctggccttgcctgctgtgtgcttgacagtgccctcactgtctacatgtcagtctgcccatgtgccacacatggcagtgcttctcaactatttgcagtaaaggaccacttattttaattttcaatcttccaccaacccatatttttatagagtataataaaatgaatttctaaaacattaaagatacacagaatacaagtccctccctcttctagttaaatcagatgacatagtgtaatctgtgaaattgctagatgtttataaacacttttgatttctctgcttatctcattgaagactaggaagagtttgaaggctggcaccgatctgtggatcacactctcagcagcactgaagtgtgggacatgagatacccgagggaaaagtaggatttcagaacacagatggtttgccagaatgccctaagtttttatttgatttctataagctgtaatgtattataatttatatccacctggtagggaatttatgtataatattgatttttaactaaaataacccttagaggaatttgaaaaaaacttaaaagttaccttttagtaatggacagattgaaaatattaataaaggcaaacatagcttacaatatgaaaatggatgagtggacatttctttaactctcagtctcagctccttgtcagccatattatgaggtagaaaaaataacagtatattctggtattacaggaaattggttaaaaattccaagttagcaatagaatatttaaaatatcaaatcaaatttatagtggttaataatgaaccttgccataagtatatattgggtcttgaaatattcattaattacaatatgatctctcaagtcaggcaagacatttaacaaaatttatctgtatctccacttgtcaaaattccattttatatctattttgtaatatacacaatatgttagtatatatatgtatatcatttgtaaataagcagtcgtatattggtgtgaggcttagcattttttcacaggggtcatgtacaggaaatgttttgaccttggcatgaggtcacctccaaggccttccacatcacaaaggtagtcagtcatgtctcaaattttaccttgtgagtgcaagtcatcatttctggactttctccagtttgagtgtgtctccaagactgtgaactcagggccagctctgggatgtgtttcccaccaattctaactcataaagggccggagagctgagattgtatgtgctttggtcttataccaattacaaggctcataaagatacactcaagagggtcatcgactctttctacagtttgtctattccaagcttcattaaataatgtggattaaagaaaggccattttgggaaggcagatgtggctctaacctgactagtcagagtaggctgactagcagaaatatggggatggttactttcagctagtcattgacttggccatagcaagttcacaaccctgggcttgcataaaattatttaaaatttcactttatttaaaatcatacttaattttgctcattataaaagcacatcaagctcattatggaaagttttttaaatgcattaaattttaaataaatttaacaataatttttttacttaaatcattaatttttggatctgtctattatatatcttcatgccacataccatacatatatgtgtgcacacatgtataatattaaatgtgtatatggttgtaataagaatatatgtttttcttttttaaataatatagttttcattccccaccttttacctatacgggccctcaaaagccactggggagattgagctctactaagttttggtcctgaggcttcctcttccatgtgacgaaagggaccagactgaacaagggaagccatgtggacccattgatgtgatgagggctatctcaatgggattgcagaagacatgattttctcaagctttcagcagcagtcttttcttatcttggatgtgatgctttctttctaatatcacctttgtctcctgtgcaaacccttctcaaactcttcttgaaatctggtcccaaggcaaagcttcttagagccaacctggcgctaccctaatatctgctcatttcatttgcatgtgacttgtgtcatttataataacactaccaagagaagggggcctgtaaccagggcaaccagaagaggtgccttcgaaattctggctcagccagactttctgctccgtttagttagattcttatacattcatggctctcttctctcctgagattgcaagaatgtaaacacctagaatctccctcatctcatgtccttttctcccagagccccctctgggcccacctatccaacacattctatttctatcaacctgaacatttcttcaactgttacaagattcctattcaattactatccaacattgtgggtcataatattttctaatgttaatacaatctctgatcattatttttaatgctgcctactgttatatccaggaggtggaccgtaactactttacaattctcatataattggattttgggtagtttccttttttgtttgttttggccattatgtttagttctctgatgatcatctttgtgcattacttttgtttctgtcattaagctataggagtccttccctaggatagttccctggaatttaaattactgatcaagagatatatttgttaggcttttgatgcatagtgctatgttaccttccacagagtatcagtttaccctgtattgtcattgtgctcatttctagatatcattgctaggtatttcattttaaaaatattttataagcaaaaatcgaagtagaaatagcataacatgacaacttgctttttatgttattagattggacatatttccatgcttgctagctaattacttattctctttgtgaaagtatttgctctggttttctttcctttcaattattcacattttacattgcaagttgttctgcctatgaggttgggcagaagccttgctcttaaaataggagtaatcatatctttcagccaatcacagctgatgatcaggtgaccaaattcttccctggtgatgggtcagaagagttgtgtgcttttgagcacagctgaatcttctctgaatttttgttgagggagagcgctgtatgatcatgtattaagattcttccagatctacaccctagtcacctaagaatagatgctcctgttggaattcagctaactgtaaaaataggtatgcatatctttataatttatggtaatgatagtaataatcattcatttttattgagtgcctgctctgtgccaggcattttaataagtgctgaaggacctgctgaaaataggtcaaacaatactctgtcctcatgcagcttatattccagtgaggggagatagacaagaaatctataaaagtttagaaactaaataataaaataagttggatcattttatatagttatgaatactattgaaaactacaataggaatacaggacagagaaggacttagtaggggagtctacttaggatgataaggaatccctttagggaaaatgataactgactaatgcaagaagtctattaagagtagttctagggtgaaaatgtttccagaaggagagcatgtacaaaggctctaaactgggaatagttttggactgtctgaggaacagaaagtgggccagtgtggctgttttagattactaggaggaagtgataggatattattagctaggcagtggtcagatcgtatagaatgttgtaggttatgcttgggaatttggatcttattttaaatgggtgccaagggaacattttaaatgaaggagtagtataacatgatttatgtttctggaatgtcactctgtgtcctatgtaggggatgtattatggtcaggataggctagactgttatttttagaggcttaatgcaatagaggtttatttcttgttcacagaaagcctgatgtggccaggtgtttctctagggaatgtcttctccatgcagtgactcagggatccaggcaacatctatcctgttattctaccccatcaacttgtgaactatatggctgccactaaagaagagatggaaggataagcacacaggctcttaagtgctctgagccagaagcaagagaccccattgctaacattcccatttgttagaactcaggcacatggccccaaactcactggaatgaagctgagaaatttagaagaacatattgatatttgatgaatagtaactgcctgtcaccttgaggcccgagtaaaaatagggatatctgttacaaagcagtttcagtgatccaggtgataatggtggctgggatttgggaggtagtaatagatatggtgcagtttctggatagagttctgaagtagagtaaacatggctagcagatggcttttgtgtgcaaggtgaaatcaaggatgactctgaaatctttggcttaagtaatgaggtagataaaggtgtttgtaactgagatgatggaatatttggaaaataaaagattagtgtgtgatgtgtttgaggagttttgggatggaaggttgtatatttgaaatttttgactctgagttgtctattaggtattcaagtggagatgtcaagctggagcctggccatttcagtctggagctcagggaagaaacctgatatagaaatataaatttcaaagcgattagagcattgatgaagattgaaattcacgaggacctgctatcaatgttaatatgtgttctaatttaaggaaacaaaacttgaggctaaaaagggttaattagcttccttaaagccataattagtatgtgattgaggtaggattcaaactgaagtctgcccaaattcattctgccaaagataataattattttaatattgctaatacgatatcaatttttggtcagttttatagctctcaaccctcttttacccatatgatttcactggtgaagaggttagatattaagaacttctgctcctggttttcaggggatgacagtgaaacataggatagtcacatgaattgactaaggtcacatgatgtttctcaggcaatctcacccttgagcctcaggttttttagtggaagcacattacactatactgtactgcttctcaatcagtgtggaattatgtgaatgttctactccattccattccatttctttcagttcagttgcagatgttcttactgaatgtttgaatgtctgagcccagggtctttggaggccacatagaggcagacactcttggctgccgaccttgagatgtacacagtcacggtgggcaggtgcacctcactcctatgactcatttccctgaacacagccttcaagcttatcagaaacagagtcccctctaatcttacaaagtaatgtactgatcattttctcttttaactgttgtagaaagaaaggtgatttatttggttatcttcatatctgagttacatgtataaactaaagaagacttactggtactgaaagcaagtactattcaccttctgattacggactatgaaaggtaaaattagatatgggaagacccatcttttaccccttacactgtcttggtagctagatcatctgggctcaaggcttctgctatcccgtaacagaaaatgctttcaaaatctctgtctcttggttcctattgcctaatatcactcccaggttacatagactaatcactttctggtgtaggctttattattgttatgcttatatccattttctgggtaagaataactctttgactctggtgctgggggtgaatgagagtcattttccttctgtgcagttggagaaacctctatagtatggggctaagaggaaggggcaggaggaaggaggcctgagccctatgaggtttctaggttgtgccagtgcaatgatctggctcccagaatgtcaaataagatgtaaggggaatggaagcttgcaaaatgctgacctcaggattgtgtcaaagttctgggcttcatcagcagtcccagtccagatgagatttcatcactgtggaagttaaccacctttggaacatttttctcttttattccttcttctctcctgcttgcctttcctttatttcttcctccattaaataacgaaatgcctatacagtcactgctatgtgcataggaagcattttgtgaggaaaaccccatgggctttgattcagaagttctgagtttacaggctctctggattatttaattgacacaaatcacctaaccgttctgagcctcaagtctctccaccagcaaaattgaggataaaaatttctgttctgtttaactcacaaagtgttggtgacactcaaatgagatattatgtgtgacaatactttgttgaatgtaaacaagttcacctactgtatgggaggcagcattttagatgatgtgggaatacagagaggaataaaccagcccaggcttttaagatgagcataaaggcaaatgcatgagaaactgttattattgatgcattaacaaatgaccccaacatttaacagcttaagagagcaataattttattatattattttatataatattcatcatgttttattttattatatatcatagattctgcaggattggatgggtgactttaactgaggtcacttagctgtactcaggagggttcaagagggcttcacttgcatgcctggtaccttggtgggagttactgaaagactgagatcatctggaactatcttccaggacatctacatgtagcctcttcagcatgctgatctcaagctgttgaatctcttatatggtggctggcttgccccagtgcaacggtcataagtggaaattgaaggccatttagaatgtagactcagaagtcacaaaatgtcacctccacaacaattagaaattacaaataaaaccaatcaatattgaagggagaggggtgaggttaggctttgtatgtaaatgtggaagcgacaaggtcactttctagaagagcataggatgatgttattgctagacttggaacatgcaacctgctatcctgcttctgatggctataatggttcacacccctctcgaatggaaaaaatactctcaactccctctctaaaggaccccaaagactcgtaccatttaggccattgacccaaagtctaggatcttatcatctaagtcaggttgaggtacagatgaagctctttgagtacagattcttggatacatctccccaagtatggttttcaacctgaatacctaaatccaaagagacaaatgatataactcccttgcaatcaatatatgaaggtaaggcagtgataggataactgcaataaggattaccatttgtaaggaggagtagttggaaagcacatagtgatcactggtcaataccaattttcatatccagctattcatgtctcatgtcgttaactcctcaattaaaacttgttactgcttctttgtttcttcactctactctttgagctcttgattcttcccaaatcatccttactttttgagagaaaaaaatgtagattctttttgcagctgatttccttcccatacttcagggatctaaatgtctctcttattctgcattgtctctaacccattttgtctaacctggtcatgtttgtgacactacaattacttttttttttttttttaattatactttaagttttagggtacatgtgcacattgtgcaggttagttacatatgtatacatgtgccatgctggtgcgctgcacccactaacgtgtcatctagcattaggtatatctcccaatgctatccctcccccctccttcgaccccaccaccgtccccagagtgtgatattccccttcctgtgtccatgtgatctcattgttcaattcccacctatgagtgagaatatgcggtgtttggtttttcgttcttgcgatagtttactgagaatgatggtttccaatttcatccatgtccctacaaaggacatgaactcatcattttttatggctgcatagtattccatggtgtatatgtgccacattttcttaatccagtctatcattgttggacatttgggttggttccaagtctttgctattgtgaataatgctgcaataaacatacgtgtgcatgtgtctttatagcagcatgatttatagtcatttgggtatatacccagtaatgggatggctgggtcaaatggtatttctagttctagatccctgaggaatcgccacactgacttccacaatggttgaactagtttacagtcccaccaacagtgtaaaagtgttcctatttctccacatcctctccagcacctgttgtttcctgactttttaatgattgccattctaactggtgtgagatgatatctcatagtggttttgatttgcatttctctgatggccagtgatgatgagcattttttcatgtgtcttttggctgcataaatgtcttcttttgagaagtgtctgttcatataccttcgcccactttttgatgggttgtttgtttttttcttgtaaatttgtttgagttcattgtagattctggatattagccctttgtcagatgagtaggttgcgaaaattttctcccatgttgtaggttgcctgttcactctgatggtagtttcttttgctgtgcagaagctcttgagtttaattagatcccatttgtcaattttggcttttgttgccattgcttttggtgttttggacatgaagtccttgcccgtgcctatgtcctgaatggtaatgcctaggttttcttctagggtttttatggttttaggtctaacgtttaaatctttaatccatcttgaattgatttttgtataaggtgtaaggaagggatccagtttcagctttctacatatggctagccagttttcccagcaccatttattaaatagggaatcctttccccattgcttgtttttctcaggtttgtcaaagatcagatagttgtagatatgcagcgttatttctgagggctctgttctgttccattttaaaaattgtgtgggttttaaaattaagcttatcagttgttgaccacattagataaaagccacacttgcaaatatttctgacagtctcttctttagcttgaattcccaaacaggctcctagggatttttagaatttctgttgtctaacagagaaggtctgtgaggtacatctttaagactatagaaggtcttttgtctttctgagaagtcttcaaggcagcattttaaatatgtatgaagtcttaagaaagggtttacaggtatacccttcatttcatgggtccacattttctggctagtctgcaggagttgatctttgcattgagaacctctcttattttggaattttctgctagaaaacactgagaataaaaaatattttatttttgaatccaacaaatcttggcttctatcttctatatactttatttaaattctgcttgaaaacagaatcccttctttacttaatctatgaactatctatgcacctatgcatgcattatgacatgcaattaagagaaaccaaaggatcattcaaatttctgcctggacacttcagtagttagattcaccagtttattaaatagattttctactttccatattactgcatgtgaaaaatttctaaaattttctgccactagatattaggttcgtgcaaaattaattgtggcttttaccatgactttaatggcagaaaccacaattactttctcatcaacctaataacaaaagtagcttctttttcagcttccaatattttcccctaaactcctacagtagttttcttgagttttggttccactaaaagtctccttaaggttctcctatcttccttcctagacacagtctcaaagccaattccacatattttatatttttttattgtaacactgtatttccaggaccaacttcttttcaagttactattactgcatgacaaccccaaattttgtaaaataataatttataaatgtctaatggattctgtatgtcagaaatttggtcagggcttgtctttgggattcttctaatgttaactaaagtcactcaatgacactcagctagtttatgcacctgtcttaagggtctaagatggattcactcacatgtctagtgctttggcagaggtgattggaaggctggacacatatgggatccatgtgggacccacaggtggtctctccagcatggtggtctcagggttactgtactttttgcgggcagctggattctcctagataattggttctcaatgggtggtgggggggggggctgcataattctatcctccaagggtttttggcaatgtctggagatatttttggttatcacactggtggggggccggggagtcgggggagaggcactactggcatctagttggcagaggtcaaggatgccactaaacatcctgcaatgcacagaatagcccccacacccaacccacaaataattatctggccccaaatgccaatagtgtcaggttgaaaagctttgtcctagagcaagtatctcaagagaactaagcagacactgtatggccctttctgacctagtcccaaagacatacagcatcagattcagcccagatttaaaggaagagtaattagacttctcttcctgataggaggtggagaagtcacattacagaagagcatgtgggatggggaatattgtcacaaccatctttagaaaatacaatctgctgcaggaactgtcagggaaatatgaatgtgatcagtgccgtgaaaatgggtaagcataatgcgttaaagatgcaggaggatctgtcacttctagttggagagataaaatggggtttcctgaaaacagggcaattaaacaatttttttaaagtgacaattgaaccttgaaagaaaggtagtgcttttaaatatgtaattgaagcaagaacattctaggcagtgggaacaatataataaaggtatcaacattcaggaattaacgaactatggcccttgggcccaatgcagcctgccgcttaatttctaagtaaagtctactagaacccaactccactactcaatgtgtggagtagttgaccacagagaccatatggcccagacaacttaaaatatttactgtatggtaaacatggtcctttatggaatagttaaagaactatccatcaactagttctttaatttatttcctgattcaacaaataatttgttaagtgcatgccacgtgccagaaagtgtgtcagatgtttagtgtatgctggtgagcaaaatagacatcctccctatcgtggaaggtgcttttcacagtttcaatatttgagaagtatgaagaaaatagcaaggtcttgtgtttaaaaatattaaaatacttaggaagattgaacctgagaaggcctttatcaagattaaacctcatcaggcaagacccaccagatgagaaagagccaaccatgagatgtgaatgtcagagataagatttattgggaacgtgaaggatatacacaaagttcctaatcaggaaggaccttggcttgaaagagaaagtgaaaggtggccagtgtcggtggggtgtagtgagcgaggtagaaagtgtgatggttggggttaaaggcagacatggatcaggtcttggtgagtcttacaggccatgaaaaggaggacccaactgtagttgaaaaccacttgagaattttgagaagaatgaaataaagcaattttcttaaagaaaaagagaaacctggcagctggattgagggaggcttagatagggagtgcataaaaaagaaactgaaggatagttaaggcagctcataaaggtcccaagcaaaaaatgatggtaccctgatatagaaactgttcttctccgactttactgtgcctatgttcttctgggactcttgtcaaaatgcagaaactaattcagtagatgtgggatggagacatgctgcaatgctcctggcccactgaccacacactaacaggggcctagtggtaaagacatatcaagcgagtttaaaaaaatatatatttattattcaaatactttaccatgactagaagtcttaaagtaaatttccaacacaaaatcatgcaaaagacaaaatccaacccaggaactttcaaccactctaagtaaatcagcactgagtgagaaaaccttttgcagagcttcaaatatgaggcataatctgggaccctgagtctaagaaaagaatgaaattccagccatttaatgaggaagcacccagaagatgatcaatattattagtttttcaaacaagattttattgagcaaatcaaaatgaagaagagatggtctctgccttaacaaaaagttatgtgggctgggcgcagtggctcacctgtaatcccagcactttggaaggctgaggtgggtggatcacctggggtcaggagttcgagaacagcctggttaacatggtgaaacgcagtcactactaaaaatatacaaaaattagccaggtgtggtggcacacacctgtaatcccagctactcgggaggctgaggcaggagaattgcttgaactggggaggcaaagtttgcagtgagctaagatcgtgccactgcactccagcctgggtgacagagcgagactccattgcaaaaaaaaaaaaagtacagtgtatttgtgaacagatagatgtaaaattttaatatattatgaaaggcatttccacaggggtatggtcaggatatcatgggctcacccaagggagacagctacttataactaccttgtacttcctggaggtacaaggaaaaatctctagaatgatattgaaaggatgagtaggaggcagaggacaaaggaagggaacgatgttccagagagaggagccagtccagagtttgagagagtgtaatgggagacacctgccacttttttctatgtaagaactcatagaattgactgtcagaagtgtcttgtcagacttcagactgaggtatagtgtacatagggtcattaattcgggtcaattaaaaccaacaagaatctcttaatctgctagtatgagcctgagcataatagagacttaagaggagagatcatattattaataacaataactaatatctgatggaacttgcaacacatgaagacacttgagcccagagaacaaatatgaccagttcacaatttgccgaaggtccccaagctcatctgtggaagaaacagaattccagcctggcttgtcccactatagagaatgcctttgctggaacttgcagtttatttagagagaaaaaaaccaatacacctgaaacaattaaagagaggtacgaaatcaacattacagtcataagctagattgcactgcagtttcaaaatgaaaattgctttatcatttttcttctgattataaaaacaatgcttcctctaggtaaaacagttcaaaccttatagtacagtgtagtgcaagagatgaacattccttataatcccattgctctacccaatgccagaaacagctacttataactacctttgagcttaagcttatatgtgcaccatctcacaaaaagaaataagcttttaaaaagttggatcatactatatataatgttatgtaatctatttttccccccacacaccatggagctatttgcagttaaaactgtacttatattcttcctaaacccttacaatgatgcatctagttctttgagatcgataattttttggccacttgataccatctagctccatgtaattaaagcacagtcacctgagagtactaaaattgatcataatgttatttttgttttgttttgttttgttttgagttgagttgaagtcttactctgtcacccaggcttgagtacagtggctcaatcatggctcactgcagactggaactcctgggctcaagtgatcctcccacctcaacttcctgagtatctgggactacaggtgcatgacacaatgcctggctgttttttttatttgtttatttttagagatggagtcttgccatgttgcctgggttggtctcaatctcctgggctcaagtgattctcttgccttagcctcacaagttgttaggattacaggcatgagccactgtgcccggccataatgttattttggcaatcattttctcttatcatccttgccaataggtcatcgtttagtcatgtgacaggttagtgccactacctacctcctcagcacatggcccatcatttaacaaatcattgtatgtgtgtgtgtgtttgtgtgtatggcacatatttgtatctaaataaaccttaactatatttaaatacaagtatgtgccatatatatatataatgattttatacataatgatttcagatggctggatttattgcacatacttgtatctaaataaaccatatggtttatttagtatgtgcaataaatctatccatttgaggtatatggtgtttgatcagctctgacaaatgtatatggtaatgtaagcaccaggccattcaaaatatagaacacttccattagccccaaatgtcccaccttcctctttgcatttgatacccttctcccatccccacctccagacaaacattgatctattttcagtacctataatattgcctttgcgagaatgccatattaacagcatcgtaaagcacgcagtctcctatgtctggcttcattcacttggcgtaatgcttttgagctttatccatgttgttgtgtgtgtcagttgcttgttgctttttattgctgagtagtactctgttgtgtaaatatctcacactttgtttatctattcaccagctgatccacatttggagagtttcaattttttggctattatgaataaagcttcaatgaacattcacatatggacctttgtatggacacggtttacatctcccttatgtaatgtctaggagtggaattgctgggcttaacatcatatgtttaactttataggaaattgccgaagtgtcttccaatgtggctgcagattttgcctgccagattctcagtgacacttggtaacatcagtctttgattttagccattctagtgaggtttagtgtactgccttgtgaccttactttgcagttccctgatgactcatgatatggagcatgtatgttttcatgtgcatattggcctatcacatgtcttcctctttggaaaaataagtcctttctgtatttttaaaaatgagttgtttgtaagttttctttatgtatacctgatacatatcctttattgggtacacacatctttgatattttcctataacttttggatggtagcttatatttttctttttcctgctccatccagtggaggtttggtggagaagagctgatgagtagatgtggcctcccttgagtctagggcccggggatcctgactgtcctgctggcccacatctgacctttaagattgttaaaattccagggttttttcttcttacccactttaataactaccacctgcttttgatccatgctctgccatagagcagaaacacttcttgcatcctgtctctccttggagtggttttgtaccatttgaaattcagttcaaagggtggttttgcaattgcaagtttcttataggctaactttatatatatgtatatatgtatggttatacatatatatatggttgtatatatatgaatataatacatggttatatatatataaacatgtatgttatatatatatatatataaccatatatgtttatatatatatatatatatatatatatatctggctttactgttgttgttgttcaaaaatcctctcgctcctttctatatcttaagcagaagtggaactgcctgcctccatccttgctcttaatatgacaaaagtctccactgatggcattattggagttggtcagtccttttatcctgtgtgagcccactgagaccattgtggcctgggctttaaggtagtagaagctagagcttgagcatttccattgccttcattatgactgatctcttgccagtgcagaaggtatttctgctggttttcattgcctttctctccagcaccactgggaagtatcttttccccatccttgctaaaggtttttcaaaagcccctgtatatgatagctctcctttccatttcactcttcttttagtttcttacagctctgtcctctggacacttaacacacatccttctaggacttgtttttaagaaagtatgtctttcaccaaaggctcaattccttgtgcaaaggtcctaactgagatggatactctcaattctctccatctcagacagcgataatcactccttcctatacacatgcctgagatgttcaagagtggtcctagcctcttcctcagtgggtgtattaactaggttctgactgccaactcctgtgactcataccctccaaggcccaggttcattggctctgatatgctgggattcccaaaatgacctctcaagttataccttacttcaggaatcctggctaccaatattaatattctaccctcagatgttcacactctccttccaaggtgctgtgtttgtatctaaacatgttgttcctgcatttagctgaaggttaaggcttgcaatggattatctgatatcagtgctggccgaatgtccaaatcaagctgattcaagatagtgagttccctttcaccttacccctatttaaggctgtgatcctttgaaacatactctgagcccatttgctttccaatagaagtaaacaaagaaaaaaaaccctagtagatgacttattgttttagaaaagcccatgcactgacataatgacagacccactatggccatcatcattgaggctggggccatctgcactcagatcatggcagtcactggttgatgagaacatagctcttatgggatttcagatgaggtctgatagacatggccataaaatcttcaccttttgccttccaatactaccttgagacaagcttaccaactgagctgtaaaattgtgacagtgtagcttattgatccattgtcttgttggatattattaagcatgagatttggggttatttccttcattccttccttttttccttccttcctctttcttccttctctccctctctttctccctctctcccctcctccctccttctctccttccttccttctctccttccttccctccttctctccttccttccctccttctttgcttccttccttccttccctccttccttcctttcttcctgtgtccctccctccctccttccttccttctctccttcctttctccctccctccttcgttccttccttctctccttccttccttccttctctccttccttccctctctccttccttctttcctttctccctccctacttccctccttccctccctccctccttccttcccttgctccctccctccctttctccctctctcccttcttcactttctccctccttctctccctcctgccttctctccttccttccttctcttgcttcctccctttccctccttccctccctccatccttctctccttccttccttccttccttcctcccttccttctttccttccctgcatccctccatccctccttccttcctcccttcctctctccttcccttcgcaggaatttacaatgctctctatatgaaattggttatattttgtctctgggctgtaaaacagtaagattgccacccgtttctattcttcctccccatgaaaagagaatgacactttaagacacctttataactagtctacagaacacaaagcccaatcttccaaaggatgcctgtcccatttagggttaataaccctgcatttattaaggacagggccacagagtcccaaatccccacatcttacaactcagaaacactaacttgaagaacatcctggttgacttgggaaatatattttcctgagaccagtggtttgtgaaatatattctccaattggctgatctcttgcacagttgtttgtcataatcagattttgaggccatatatctcctttcaagtgatgattgtgctataacctctggctccatccacatttctggtttgggtagagcagatctcagcaatgaatgaaaaccgtagctgtcttatcaaatagcagcagtacttgttttgtttaatagtgctggaaattagtttttcaggcactgatcttgacaggtcagctgtcaaaagtgggtgtgtgcggccataaattcatcgatcctgtaaacaaaattctgtctgcaaaatacaaggggaagtcagagtagactcactcatgtacaaatgaaatggtctggagctgtatgactaagtgttgggacttctttggatgaaagctttttctggcttcccacttatcaagcccatcggcctcgtttggcttttattgactgaaacattttcctgagcattcagagtggcgagcgccagaccccctcaggatgggggagggatgcatgtctctcctaatcttgggtgactacaaggctggtgatccatttaaagccttcatttacataaaaaaaattccactggattatttcttgtgaaccgtgcttttctatgttctggccttatattttggattgcagacggatggccttgaccagtaatgatggaggtttaccactcttgtcttaagatttgggcaagatcacacagttttgtggaaatggggagattcactcagcctggggcacttggcttctgtctgatgtgagggaataataaagtttcctacccaatatgaaggatcctgaatcctggaacatagttgaactttgatgtgtttgaaaggcagaattttgattttttgctttgaagtattttttttcttgctttatcagggtacaggatgcctaaaggccagggagacagaagtctgtattaaagcaaaacaaaacaaaaatacttttaattcctaaccacttttagataaagagagaagcatgataataggcttggaagaattttttttccttcatgaaattccattttaatttacatggccttctcgtattaaggttgtctgaatattaactaaaatgatttgaagctgctcctctttctcagcagagaaagattacttggattgcttatcttcatggatctgggcctcagctgtggccacttcctatctcccaactcaacagtttacagagctcccaccatcttggagagatcctagaatatgagatgctgtgctggccaaactagccatatgccccctctaggagataaagcacccctagaccaaaattccttacagccaaagcactgatttattgggttctgactctcagattggccttgacatactgacaggtaatttgactccaattgctcccctatcatgcagttttgagtcgtacaagtgcatgtgataggatattgcttaatcatctatgctagttatttttatcaaaagcttattttacttcctattagtgaaaatcctgttaaaatcaggaagaggataaagaaggtaataatgattacttataattccatcacctatatgtaacacatatatccacgtatcacattttaacgtgtcttctcccgtttttaccactgcttttaaaaaaacataattgaggtcatattgtatacagttttatatcctggttctttactttgtgattcttaattaagctattttataatagactgtttcaaagttattttcttctttgaacagcccctcaatttgtaggcaaggaagatttttatttcccatttcatagataagaaaatagaatcagctgggcacagtggctcacgcctgtaatctcaacacatttttctgtatttttttgtatacaaaaatatttgttgactctttctatgtttcaagcattgtgctgtcaagtgctatctgaggtcactcaggtaagtggtgacaacaattagaacataggtctactgactcatgaacatctgctaagttcacacctccaagttcccatcttcttctccagttacagaagttaatgttggagaggagagcctggaattcgaggcaaggttggagatcctgagatgggaatgagcaaggccaggtctagcccaagagcctgaggctctagacagcttatgaagacagagttttgaccccagagaacatggcaagaaaccccaatgccacagctgactcactgacttatgccaagagtagaaggaactggaggtccttctatttcatttctattgcagatttgcataaatcatggatattgggctgaacattcattagttgtgataaatgtgtcattctaatgttatgtcttaatgggaaaaactggcttatggatctattgacattctgtgtacaatatctacaacttttctgtaaatctaaaactattctaaagtgaaatcttatttcaacaaacaagtaagagtttaccagacccagaagaggagaaagggcattccaggcagagaaaaactagatacaaatatcaggagggaatgtggtgtgcctgagaaagaaggagggattttggggattttagtgtactgtaactacataaactaaagtgaggttgagagtcaggattggctctggatgaggaaggcttttcttttaggccaagctgaaaagtcttaggatttattctgtaagaaaaaggaattcattagaatattttaattaatatagttcatatttgagtttatttgttgtaagggtacccacttgcctgttgaaggatgtgctataagagaggctgagagcagcgaaaccaatgagaaagctgttgcaaaggtctagggggactgaggtggtgcatcctggagccaagcagtgagccagaagcagagaatgatgttcagggcttcatcccaactgtttcttcctgcctccatcctccattctaatttctgattataatcccagtagaaagacaggtaaagccttgttgatcaagatgcacagagctccattccaaacactcatccaagccaagacagtagagaattaagatgccccttcaccgtaccaggaaggtttggcagcagatgttacgaatctgggtcctggtgcaggataagagtattgagtgcctggaatggtcacatcatcattaggacaagatgtcttctgttatgactctgtgagccattgggatggtcaagaagacctctataactccacctacacccaggagaagtagcaggacacacatcagggctaagcagctccagcacctgggctaagcagttatgggagtgcagatgcaggcaccccaaataaatatccactcctgccccagtgagtccatagtagaacatccaaagaatagaggcaatcaaccccttgaccccatttgtctgaatttgtcctcttccctctgacaagcattttaatccagctgtaggaaccaattctgtatcttaatgcaatttcttcctttcctttcctttttcctttttcctttcccttcccttcccttctctctctctctttctttctttctctttctttctccctccctccctacctccctttctttatcccttcctccctccctttcttcctccctccctccctcccttccttccttccttcttcttcttttttttttttttgtcagggtctcactctgttgcccaggctggagtgcagtggcacaattgtggctccctgcagtcttgacctcctggtctcaattgatcctcctacctcagcctcccaaatagctgggactacaggagtatgccaccacactggctaatttatttttattttttatagaggcagtatttcaccacattgcccaggctggttttgaactcctggactcaagcgatccacccaccttggcctcccgaaatgctgggattgcaggcataagccacagctctcagcctattttttaaggtccaatggagaaatagccatgatttttgctttttttttttttaactgtatcattacccaaagtgtggtattttggtatcttcgaggtctttaagcagaattttgggtagatcttcacttgttctttatctcaatgcccccaaattaattagtggtggtggcggtgggtggttctttggggtacatggccatgttttttactaatttatttattcatcacaccaaggcaccctattattcaggatggagtgggtcttggtgggtatcatgtccaaggtgacaacaggaaattccaggtttctttaaaactgactctagaactccatctcttattctgatggttttacatctcagagttgttgtctcttccaggaggaatgactcctcaggttctatggccttatagtcagggcttagtgtgcagaccctgctgcagatgtcaggaccatgggaaatgctgacagagtagaagcattctttactttagggcccccagtagcacttttccactggagttcttcttctcttcaggttaactagggggtcttatggattttccctgacaacagtatatactgcctgtggcagtttgaccctttagccccctgctatttaaattgtggtccatggattagcagcagcagcagcagcatcacctgggagcttgttagacatgaataatctcaggccccagaatcagaaagtgcatacaaaatccctgggtgatttgtgtggatatcatagtttgagcatcatggctttaatctacagcagtggttcacaattctggctgtgcattagaatcacctggggagctaaaatatccatctctagtccactacagaccaattaaataagaggctctgggggtaaggcccaactttcagtacacttcattataaagcccccttaaaagatactaatatgcagccaagttggaggcccagtgacctagaagagcaggggttctcgacattggctgcagtatcaggagcactcaggaggcattaacacttcctatgctcaggccctgagatcctgatttagttgacttgagatggggctgggtatctgcattttgttatgtcttccccattaatagtcgagaatcgtttcccagacaaaagttttgtcgttgtatagaccctgcaaggatgcagggaggggaagcagtctcatgaacaactgtgtctcctcattgtttctgagccaaggtaggttctccttgaccaccttagggtgactatcagagatgcctctggctattggatatactctgcaggcttaagagaatgtagcagattcagagcacatttactctgccattagcctctacctgcctgtcaaggaaaatgagggagctggcaccacagtgaaaacaggcaggaagctcttgaccctgcttgccataggcaccggggtgcaagacaagctgtacacttgagtgtttgctacttgctttactgctgagcttcatcctacccatggagggagcaatggctgaactcaagggccttgtggcctgggcaagtcaaaggagtaattaaagaaagagggtattttgcaggcatcacagtgacatggcctctgtgggtgaacagaataaaactggacataaacatttgttctagagacaagttctcaccagttggtttcattttagggctgtgctgagctctatagagatccaggcgagctgaaggaggacatgtaactctgtctaccatatatctattctctttagggttttaaaatggctctgggtctctgggaactccaggggactactgttcacctacctgcctaattcaggatcccagtgtaggagccgaggtcctatggtgtgcacgggtgccagttccatccctcacaatctttatttttccttcacagttggcgacatgggactcagagaagggcttgaatggcagcttgcaagagaggcccatgggcagccgcctccaaggattgactcttaaagtggtgactgtcttggtaggatcatggggacattctgggagcgagctacaccatccaggctgttgaatcagaggctgctttctgtttaatgctgggtttggggagaagagaatcttgaggagtattgtgagctttcataaggcctttcattcaaataattgtatgaataatgaaaggaagagtgagattgaagtttctgccccaggacctctgtgccttccaaaggaagtccctgagctgctctagaaaaggacttctcattcacagcttcctctgaggaccagagggggccaagctgctccatttgttcttggatgtaaaatggatcttgacccactactggtccttaggagagttgttctggtagccagaaccccaagatagatgctggaggaggacattctcttagcacccaacaccagtgatgggctcatgtgacagtgacacaagttcagaatgaagaccattcggtagttgcaacttttctgcatggatgtcctggaatcatagacttttgcatttgtaagagactttaaaagcatcttcctttcaattgcttttttcacatttttataaaaactgcaggagacattatagacttgcctcttattggctgagtcacacgtgcccaaacgtcccctctctcccagcagacactagcattcccttggcttagaaacctttggcaacagtatttctgcattctctgtttgcacaccacagataagctttacaccctatttcccaacacaactaaattaatgagctatactccctggagctgtttgccaaaggccccttgttcagtttcacacaagaaggaaggggaatggtagggagtgccaagacatttttcagatgaccacctcgctcacatgtggcatagcacaacatgtgcaggtgtgagcatggcatggctttgaactaggaactctgggtttgaattctgtcctaccctttggcttctggtctggccttggtcagttaatccatatccatatccactttctagtatagcctgtagatataatgctttttctctcaacctaatgtcacagagctttatcgccacttactatcctggatgagaagttgcatgtttcttatgtgggcctcatataattttggcatattctaaggatacagtcctagctctgcatggatgttacaaacggaggaaggaaaacaaaccatgttattcagggaactaggggttggggcagagcctgggatgacacgggacaaatgaatctccactcctctgtatggacctactgattggagtgatcatcctgtgcactgttccttgagtgtccataaactgcttttagaaaaaggcagagaagttgagcctgaagtcctaaattggggaactgcaaatgttctaatcagatctttctctctaacattacactggaaatatgtgttgatgaacctgttatttaattggagaaccttcattctgttgtcctcaggaagagcctttcgtgatggtggctgagaacatcctaggacagcccaagcgctacaaagggttctccatagatgtcctggatgcactggccaaggctctgggctttaaatatgagatttaccaagcccctgatggcaggtacggtcaccagctccataacacctcctggaacgggatgatcggggagctcatcagcaaggtaggtccccatagcagatccagggggaggggcaccctagtcttcctctggggtaatatctaaacttgaccaattgcacagtggaaaccttgggaccagctaaacagaccacagttaccattctccccacacaaaggctcttttgtcttcaaatcccctgctacatccatttctgctcttgtatctcctcgtctctgacactctatgttacctccctgcccattgctgtcattcctttgaagtctatcatccactgtgcctactctgtagcacacccttcaaggaacctaccctacgtttagggtgaagcagaaacctagttcccaccaggggtactgatgagtgctcattctcctatcccttatagaccacaggttagatattcatacatatgtgtgtatgtctacattgctatgtgttgatggtgtggcatcccccaggtcctcatacttatttaaattgtactcttcttccctcccgtagaaactgcatcttcattgaaactcgtggcatgaggccaacttaccatgtccccattcttgtcatctcatgacactgggtcatttccccatgattatttatcatggtggcatctgactcaaatcctccatctccattatttctcctgccaccattctgacaatttctgacatccctgtggacaaccctggactcccaatactttgacctcctcgcctccagggacctttgctgtactccactccagtgttcacccccatgcatcttgttagcatcttacatgtcaccatcactagcccactgcatgaccacaacaagttgtccttctgactcttttgaacttttactctcacagcacaggccctttgctttttaaatctgtaaaggcagacactaggcttgtcattcgtccgatttctattaatctttttcagaaacacctttactgtgataaattcacatactataaaatttatccattttagatatacaattcaatgatttttagtaaagataccgggttgtgcaaccttcattataatctggttttagaatacttccgtcacgccattgatatctttcatacctacttatagttaatgccattcccacccccagccctaggcaaccattaatctactttctatcttatatagagttgcttcagtgaacattttgtgtaaatggagtcacacaagatgtggtcttttgtgtctggttctttccacgtagtgtgtgtatttgaggcccatccttctctgcagcttctgtgcctttctgatactgcgtcctctatgggtggccagacaaacccctcctcccttcatcccttgtgactccctctgttcttaatttttttgttgcatcctaagcctgaatggattctattatctatcctcttcactctgaaatccaggttgctacactaaattagagaaggaaattgtgaatctgtccagattgctttagaaaccctgtgtggtctccaaaatcagctgggcccttcagtactgccagaatcttttaacttgtcctttgttgggctccttggctatgtctctcagagaccgtttaaaaagtttacctttcttcttgagctacctaagaatcttctatccttcccaactaaaaaaaaaaaaatgattgtacttctatattggggaaataaactgagattttggggcataaaattgtacctctaattcctatgaaatttacatctgcaggcacctgccatctcccacagaagggagtgtcccctgtcccctgtcagtctgtcccactgtcacaggacaacccctccacctgtgtcatgagttgattcctttgtgcctcctttgaaccttgcttcataaattagtttcccttcattttgtcttgtaagcctatcctgctccattaaatctctttttaagcccttaaatatgctccaaactttcctaatcctaaaaattgtccctggatgctagagtttttagaagagaggcaagaaccagagatgccagtgtgacaagtgtaagaggagagtgttgatagggtcacttcctatttgctgcctttactcaaggtatagtattagatttctgtttaggacatgagtatatctgtccctagcctacatattaaaccttgaaaaaatccttccacgtgtgtttcctcagtttgagcttggaggttgaatcagttgtcactattggtcattctaaaagaaactagttctgctgatgcctcccactttgagggtcaagaggccagatcattatgatgactgcctttcagtgctcttgtgactaaaggaggaccctaagccccattgtcacctggcatccacccatccggacatgaaacccgtaatcgccccaaacttggcagttttctcctcacagtctggatccatcttaatggggtttctgtctgtttttaaaatgaagcccattttggaaagcaaacatcttgggaggtaattttaaggtcatagtagggcacatccagagagattcttcacaccatggctttaccatggaagaataaacctgtgggtttgcaagccatgaattaagggtggtggaagatagaaataaatatatgacccctttattctttcagtattttactctctggcatgaagtctacatatgaaacactcactggctaatatgttaatgaggtctaacatagttgtagaactcaccatataacttctgaagtgttttagaaaagagaaagatcaatgtgggataatagagtctgagaggtgtgatgaagaaatggagtgtgcctctggtcttaacatgtagggaggatgcacacaggcctagaagatagaagggccttcttggtggagggtagagggaaacatagggaaaataaaaagaagatagctaaagtttggtaggaaaacaacaaagtgaagataaactataattcgtagagaaatgaagatactttactcggctcttttctgtagaagcagtttcctgaagtttttagaagagagagacttgtaaggtgaaggaaatagtaacagacaacttagtgttggattttccttataatattcagactctcagggtgccagctctcaaatccattcctctgaacagagcaactcaaaggacagagggtggaccttgacccagggcagaacccagcagtaagctgaggactgccgtctaaatgagatggctttgcctttcagagagcagacttggccatctctgccatcaccatcaccccagagagggagagcgttgtggacttcagcaagcggtacatggactattcagtggggattctaattaagaagcccgaggagaaaatcagcatcttctccctctttgctccatttgatttcgctgtgtgggcctgcattgcagcagccatccctgtggttggtgtgctgatatttgtgttgaacaggatacaggctgtgagggctcagagtgctgcccagcccaggccgtcagcttctgccactctgcacagcgccatctggattgtctatggagccttcgtacagcaaggtacctttctggtttcctgatcattgaatagctctaggggcctggaagaacttatccattggcaaagttctcaggtgcattttaccaaagtcattccaaatgcaattttacttaatctctaggacagtacaaatgtcatgctgcacccaatttctctgaataatatcagagagaaattaaatgaaacaacaataaggagctcaacttcaattcctgattctccactttagataaaattaactttggagtcctgctttgcacttttctctcctcctacattaaagtgattgctatgcacatgaggttgtcaatgaaactgtgaatcttgcttaaatttgatgacttaatggggaaaaaaaatcccaattgtattgcaatcatttaagcagtacttcagccattcttgaggtacaaattctcctacctctgaggggtctggatggtacttctatccactagtgagttataggattgtgccattttgactggagcaacaaattgcaaagtttctaatgtgagtcttcatcctgtttgcaccatggcaaatgctttgtgaggttatgtaaggagaataagcagtgagaagctctcttctcctaacactttagagaccaaggagaaataattggcctcaaagaggctaaacttctaactaaaagtctcatgccctgatttctgagaattctgggggaagaaaagccatctaatgagggctgaatactaataaaagtgatatgggacatctcatttctcaggtttaaaagaaagccagggatccctccatgtagtaggagttatttctatatttacagaattcccgagtctgctatatatgaatttgaaattggaaagggatcttacataaggctgcagccctagaagttcttaccactgtgaggtagaatcttctaactgaaagattttgatattcagaccccaacccttggtgttttgacaaccttcgcaccactagaagcccagtcctaactttttcatattttgtggtcctctgcccttgtccaagatccatggttttaggatcctatcccagaattggcacagatgcccagacccagctgacagtcacctccctggttccagcccatcacgagtgatggcctgtgtgcctggctgcagggcagaacacctccctggggataggagggagagcagaagccactggccaatccactttgtctgcctcccgcaggtggcgaatcttccgtgaactccatggccatgcgcatcgtgatgggcagctggtggctcttcacgctcattgtgtgctcctcctacacagccaaccttgctgccttcctcacagtgtccaggatggacaaccccataaggtaagcctattcctccttgatctggagccagcagctcagagaggctttaaagaggatgtaaacctttccagggcagtgtggtatgatggagagagccctgatctgcaaactgatggtctcctggaatctttagtgcatggagaagagcttcactcctgttgtattttatctcaggcacaattacataaatgtataaattcattaaataatatttcctgaaaatttaatgctggctacaaagctaagaaatcaattaacaaattacattttctcagacatttaaacattgattacaaacttatttaatcaaaattttataaatatttagttaaaattaatttaaaccagaagtctaatatatgcttttttcaatcttcgaacaccttaaaataatttttttcaaaaatgccaattgccacaataagtagaaaacatatttcatgcacatttatatgattataaaattattgaaaccaagactaaaaatgtgtcttcatgtttacaaaatgttaagattatggcataaaagaatgagctcaatatagcgaaataactcttggaagtgactgtattttatgatcagattcccaaaaatagtgtaaattacaaaaaaaagaacttggacagagtgaatttggttggatgtgtggttgttgaagtggtcataggcatggatctgttgtacacttcattgggtacaatattggcttcaatattgcctctaacttgatcgctgattatggttttttgactcactgcctttagtaacatccctttaattcatcacactcactgtcatcatattggttcttttgatccatagctcttaatcaagtcgtccatactcaaccagcctctatgggtctcaactagctattgaaaagagtttaaactccttgcctaggattcaagattcagtatgatattgtctaatatctttattaaattgacatttttattgagataattatagattcatatgtagttgtaagaaataatgcagagaggtctcctgggatcctttacccacttttctcaatggtaacattttgcaaaagtctaatattatatcaaaaccagggtattgacactgatacagttgactgattttattcactgttcccctcttgtactcatctctctgtgtgtctgtgtatatgtatgtgtgcattcgggtctatactattttatcacttataaacttgtgtatctgcaccacagtaaaaatactgaacagatctatcaccacaaggatcctttgtgttgtccttttataaccacccaaatatttttcacatttcttcccctgacactctgtccccaactctggcaaccattaattgtactccatctctaaaattttgtcatttcagtatgtgatataaatggaataatgccttttggctttggtttttttactcaacataattccttagagattcgtccacgttttcatgtgtattagtagttcactgctttgattatatcacatataccacatatgagtaatatcacatataccacagtttgtctaactattcccccattggaggacatctgggttgcttccaattcttggcaattatgaaaaaagctgccatgaacatttgcgtgcaggtttttgcatgaacatgagttttcatttacatgtgataaacacccaagagtgcaattgctggatcatatggcaagttcatgttgggtattgtaagaaagtatcaaactgctttccagcgtgtctgtatcattttatatttctgccagtgatgtaagaataatccagtttctctgcatctttcctgacatttggtgttgccattatttttcattttaccattctgataggtgtggagtcatacttcattgtggttttattttgcaattcctgaatgactaatgatgttgcacacctttttttgtgcttatttgctatgtatatatccccttcaataaaatatctgtttttatcttttctaaatggattgcttattacttttgagttttgaaagttcttcatatattttagacactagttctttgtcagatatgcagtcagcaaatatttgctgccactctatagcttgtcttttcaaactcttgtcttttcaccatgaaaaggttttaattttgatgaggttcaatttagagaattatttatttcacgaatcacgcttttgatgtcaagtcttttcctagcctgagaccccgaagattttctacttttattttttactgaaaacgtttgcattttacaattcagtccacaatcaattttgagataattttataaagtttgaggtttaggttgagagttttggggtttttttttctcttcttttcttttctttctttctttcttttttttttttgtctgtttgttttggtctatggatgcccaatagctttaatactatttgttgaaaaggctatccgtcctccatggaattgcttttgtattttgtgagaaaacagttggacatatttgtatgtatctaaattgtctattctgttccattgttatatgtgattgtccctttgccaacaccatactatcatgattacagtagctatagcgtaagccttactatagggtagagtgattcctcccattttaatcttctttgttagcattattttagctattctaggacgtgcatctatatatataaattttttctcatttgtattttttgttattttcaaaattatcacctaaaggatttcagaattgtattcagagcaaatcgactaactgaaaaattaacagaacacaattaattaaaattttcccatttaataattaataaataacaaagtatcagtgactctaatagtggactgagtttgaacccagctcaataattagttggctaaatattttcctcaaaaacattgataaagcaagtaaccatttactattatcctgatcttttgctaagtttatttatttattttttctttttgaggtattattgacaaataaaaatttacagtatacaacatgatattttgatgtaaacagggtctttcactgagaaaatgttttaattttgatgaggtcaaatttagaaatttgttctttcacggatcattcttttgatgttaagtctttgtctatccagagatccttaagattttctcttgttttaaaattcctaacatttttatatttttacattttacatttcattccacaatcaattttgagtgaatttctgtatgaagtttgaggcataggctgagggcttttttttcagtctatggatactgatatggtttggctgtgcccccacccgaatctcaacctgaattatatttcccagaattcccacgtgttgtgggagggacccagggagaggtaattgaatcataggggcctgtctttcctgtgctattctcatgacagtgcataagtctcacgagatctgatgtgggtttatcaggggtttctgcttttgcttcttcctcattttctcttgccaccaccatgtaagaagagcctttcacctcccaccatgattctgaggcttccccatccatgtgaaactgtaagtccaattaaaactttttttttgttcccagttttgggtatgtctttatcagcagtgtgaaaacaaactaatacagtaaattggtactgaatgaggggcattgctgaaaagatacccaaaaatgtagaagcgactttggaattgggtaacaggcagaggttggaacagtttggacggctcagaagaagacagaaaaatgtgggaaagtttggaacctcctagagacttgttgaatggctttgacaaaaatgctgatagtgaaacaaacaataaggtccaggctgaggtggtctcaagtggagatgaggaacttatcgggaactggagcaaaggtgactcttgttatgttttagcaaagagactagcggcatttcgcccctgccctagagatttgtgaaactttgaacttgagagagatgatttagggcatctggtggaggaaatttctaagcagcaaagcattcaagaggtgacttgggtgctgttaaaagcattccattttaaaaggaaaacagcataaaaattcagaaaatttgctgcctgacaaagcagtagaaaagaaacacccatgttttgaggagaaattcaagccagctgcagaaatttgcacaagtagcaaggagcctactgttaatccccaagaccgtggggaaaatgtctccaggccatgtcagagaccttcatggcagcccctcccatcacaggcccagaggcccaggagcaaaatgtggtgtcatgggctgggccctaggtccctgtgctgtgtgcaacctagggactttgtgccctgtgtcccaaatgctcccaccatggctgaaaggggccaacacagagcttgggctgtggcttcagagggtggaagccccaagccttggcagctttcacgtggtgttgagcctgcaggtgcacagaagtgaagaattgaggttcaggaacctctgcctagatttcagaagatgtatagaaacgcctggatgcccaggcagaagtttgctgcgggggcaaggccctcatggagaacctctgctagggcagtgtggaagggaaatgtggggttggagtccctactggggtgtggactccatatgtggaaatcaaggagtcaggagttgaggtttgagaacctttgcctagatttcagaagatgtgtagaaatgcctggatgcccaggcaaaagtttgcttcagaagcgaggccctcatggagaacctctgctagggcaatgcggaagggaaatgtgtcatgtggagtccctacacagagtccctactggggcactgcctagcggagctgtgagaagagggccaccatcctcctgaccacagaatggtaaatccactaacagcttgcaccgtgtgcctggaaaagccacagacactcaatgccagcccatgaaagcagccatgagggaggctgtaccctgcaaagccacaggggcggagttgcccaagaccatggaaaccaaccttttgcatcagtgtgtcttggatgtgagacctggagtcaaagatcattttggagctttaaaatctgactgcccactggatttcggacttgcatgggccctgtaacccctttgttgtggccaatttctcccatttagaatggctgtatttacccaatacctgtatctccattgtatctaggaagtaactagcttgcttttgattttacaggctcatgagtggaagggacttgccttgtctcagatgagactttggactgtgaacttttggattaatgctgaaatgagttaagactttggaggattgttgggaaggcatgattccttttgaaatgtgaggacatgacatttggaggggccaggaatggaataatatggtttggctctgcctccatccaaatctcagcttgaattgtatctcccagaattcccaggagggatccagggagaggtaattgaatcatgggggccggcctttcccatgctattcttgtgatagcgaatagtctcacgagatctgatgggtttatcagggctttctgcttttgcttctccctcattttctcttgcctacgccatgtaagaagagccttttgcctcccatcatgattctgaggcctccccagccatttggaactttaagtccaattaaaccttttttttttttgttcccagtttcaggtatgtctttatcagcagcatgaaaacaaactaatacagacacttaattcctccagcactatttgttgaaaagactgttcttcttccattgaatataccgtttgcatgtgcactacgaaatgattactaaaatgaagctaagtaacatatctgttacctcacacagttatcagttttttgcatgtgatgagaatatttaagatctgctgttttagccaatctcaaatgtataacacaattttattaactatagcaccatgctgtacattatatctccagatcttattcatcatacctaactgaaattctgtactctttgacaaaaagctcataattcccccacactccagtccctggcaaccaccattctctggcaaccaataaactctccgcttctatgagtttgactctttagattccaaatataagtgagagcattcagtatgtgtctttctgtgcctagcttatttgagttaacataatataatatttgagttaacgtaacataatatcctctaggttcacccatgttgtcacaatggaaatatattttatttatatattgtatatattaattatatataatgtatcacatttatatattatatatgtatatataatatatacaaataattacattatgtacattgtatatgtgtatatataatatataatcacatttatatacgttatatatgtacatatataatatatcacattttcttttttattttattttattattattatactttaagttttagggtacatgtgcacaacgtgcaggtttgttacatatgtatacatgtgccatgttggtgtgctgcacccattaactcgtcatttagcattaggtatatctcccaatgctatccctcccgcctccgcccaccccacaacagtccccggtgtgtgatgttgcccttcctgtgtccatgtgttctcattgttcaattcccacctatgagtgagaacatgcggtgtttgttttttttgtccttgcgatagtttgctcagaatgatggtttccagcttcatccatgtccctacaaagggacaataatgtccaattatttgcagataaaaagttaggttgattctggctgggtgcagtgtctcacgcctgtaatcgagcactttgggaggctgagactggtgaatcacctgaggtcaggagttcaagaccagcctggcaaacatggtgaaacccagtctctagtaaaaatacaaaaagcagccaggcatggtggcggccacctgtgatcccagctactcaggaggctgaggcaggagaatcacttgaacctgagaggtggaggttgcagtgagccgagatcatgccactgcactccagcctgggcaatagagttagactccgtctcaaaagaaaaaaaaaaaaaggttagttctatatcttgccaatttctaataatgctgcaatgaacatggtagtgcagacaaatatctcttcaagatactgatttcatcttctttggctctgtattaagaagtaggatcactggatcatacggtacttctatatttaagtttttgagaaattgccatactgttttccatattctcatcatcacttgttatcttttgtcttttttttatcatagccattctaacaggtgtaaggtgatacctcattgtagttttcatttgtatttccctgatgattagttatgttgaatattttttcgtatatcttttggtcatttatatgtcttcttttgagaaatgtctattcaggtccttgcccatttttaaattaaactatttgttttgtggttagtgagtttttgatttccttatatattttggatattagcacattatttgattttctgtcattttgcaagttgtctcttcactttgtagattgtttactttgctatgtataggattttaaaatttgattcagtcccatttatctattgttgcttttgttgcctgtgcttttgggtcacatccaaaaaatcacgccccagaccaatgtcaaaaagctttttttcttctggaagttttacagcttcagctcttacatttaagtttttaatttattttgagttgatttttgtgtatggtgtgaaataagagtctattttcattcttttgtgtgcagatattcagtttctccaacatcatttactaaagagactgtcttccccattgtgtgttctttgcaactttgtcaaagatcaattgactgtaaatgtgtgaatttatttctaggctgtattctctttcattcgtctatatatctgtttttatgccaatactatattgttttaattactatactctatactgtatttcgaaatcaggtagtgtgatgtcttcagatttgcttctcttgtttaagattgcattggtattcagaggacttttgtggtcacaggaattttacgattttttttccatttctgtgaagaatgtcattggtattttggtaggggttataccaaatctatagatcactttgggtggtattaacatattaatagtattaatttttccaatccatgaatataggacatctttccatttatttgtgtcttcttcagttttttcaccaatgttttatagtttacagcatggcatacagatttttcacctccttggtgtaatttatacaccagaattttatttttatgctattttaaatagaattgttttttgatttgtttgcaaatacgttgttgttagtttatagaaatattcctgatttttgtatgtttattttgtatcctgcaaatttactgcactattattagttcctgcatttgtttggtgaggtcaaggattttctttatagatcacgtcatctgcaaatatatgcagttttacttctttctctctgatttgaatgtcttttatttctttttttaaaaaaaaacttttaggttcggggtacatgtacaggtttgtttatagataaactgtatgtcatgggggtttgatgtacagataatttcatcactcagataaacatagtacttgatagccatttttttctgatacgctccttcctcctaacctccaccctcaaataggtcccagttctgttgttcctctcgtatctatccatgtgttcttgttgtttaacttccatttataagtaaaaacatgtggtatttagttttctgttcctctgttagtttgcttcgaataatggcctttagctctatccatgttgctgcaaagaatattatcttcttcttttttatggctgcatagtattccgtggtgtatatgtatcacattttctttatcttttatttctttgtattgcctaattgttctgaccatgccttccagttctatgttgaatagatatggtgagagtgggcacccttgttttgttcctgatcttgcaggaaatgcttttagctttttactgctgagtatgatgttagccataggcttcatatatagcctttatgatgttaaggtacatgacatttagtcttaatttgctgaaaatttttatcatgaaagatgttaaattttctctaatgatttttctacatcttttgagatgaatatataatttgtttccctcattttgttaatgtagtgtatctcatatcttgatttttgtatgttaagccattcttgcatcctgggggtaagttccacttgatcatgggatatgtttttttttttttttaatgtgctattgaattaggtttgttagcattttgttgaagatttgcacatctatgctcatctgggatattagcctgtagttttcttttcttgaagattccttgtcaggctttgatataaaggtgtaatggtggtcttgtaaaatgagtttgaaagtgttcccttcaatttttttggaagtgtttgagaaggattggcatttttctttcttgggaggtttctgattactgtttcaatcttattacccactattagtatgctcagattttctatttcttcagcaatcagtctcagtaggttgtacgtttctagaaatttatccatttcttcgaaattattcagtttgctgttgaaaaattgtttatagtgttctcttatgaccctttctatttctgtggtattggttgcttctttttcatttataattttttttctttgaaacttcccacctttttcttagtctagctaaaggttttccaattttgtttatctttccaaaaaagccaatcttagtttcattgacctttggtagtgtctttctagtctctattttatttatttctgccccgatctttattattttcctctttctgctaactttgggcttcgtttgttcttctttttgtagttccttgagatataaagttagaatatttaaaaggtttcttttttaatgtagttttaatcaacattaacttccttcttagaggggctcttgctgcatcctattatttttggtatgtttgtgtttccatttttatttgcctcaagaattttttttagtatcccttttgattttttctatgatctacttgttgtttcagggatgtgtttaatttccacattttataaattttcttattttcctccggttattgatttctagtttcatagcattgtggctggtgaagatacttgatatgatttcagtcttcttaaatttgttaaacttgttttgtggtctaacaggtaatatatcctggagaatgttccatgaaagttgaaaaagaatgtgtattctgtggttattggatggaatgttctgtatatgtttgttaggtccatctggtctatattgttgtgcaagtctgcttttacttattgactttctgcctggatgatctttccattgttgaaagtggggcattgatgtccccaagtattcttgtatcgctatttctcccttcagttttttcaaaatttacataacatatttatgtgttgtaatgttgagtgcatatgtgtatatgtacacatgtgtctattttgttggatataagtatagtcaacctattctatcaccacttgcatggaatatctttttccatcttttttctttcagtgtgcttgtctgaatccacagtgaggcacctgtacagagcatatagttggatcatgttttttaaatcattatgctaatctctacttttaagtaaatgtttaatccacttatatttaatataatttctaagaaaggacttagctctaccattttgctatttgatttctatatgacttacatcatttgtgttcctcatgttttctgttactgccttcttttgtgttaaatggatattttttctttaccattttaactcccttgatatatatatgtatatgtacacacatcatatgtattattattattatattcttagtagttgcacaggacactacaattaacatcttaataacaatttgtgttggattaataccaactttagttcaataatatacaaaagttatgctcttatatagttctgttccacctacaccctgaccttaattcttttataaaactgtttgatgtgctcttttttaggagttaattttaatacttttaattgattcagtagataatcttctatatttagttttaaatttgttatttttttacttgttgaataaacttcacaagttttaagaacaactttaggtattagaagatattactaaattatgtgtttattctgatttaaatttttattggtaaaatatacataacataaaacctattattttaagaatttctaaatgtatagtttagtggcactaagtatattcacattgtcacaatcaacattaccatctatctccagaaaacttcatcttgcataactaataatctgtacctatgaaagaactaatttcccattttctctggatgctggaaaccaccattctattttctgtctgtataaatttgactactctaggtacctcatattaatagcattatatggcaattgttttttatgaatggcttatttccatttcactttcttggtttcaagattcatccatgttgtagcttgtgtaagaatatccttcctttttaaggctgaataatatcacattgaatgtatatatcatattttatttatccattcatctatcagtggaatcttggattgctttcacattttagctgttgtaaatactgccgttataaacatgggtgtacaaatacctgttcaatgcctgcttttaattcttcggtgtatatacccagaagtaaaattgctggatcatatggtaatcctatgtttaatttttttgaagaataaccatacagttttctacagcagctgcatcattttacattcccaccagcaatgcacaagaaatccaatttctccaaattgttgccgacacttgttgttatctgctttttgtttgtttgtctgtttttttaaatagccatttcaatggatgtgaagtagcatctcattgtggttatggtttgcatttccacaatttaaaattttgtgcatttgtatgtgtttattgtcaaatttgcatatctcctttggagaaatgttattcaagttctttgtctatttttaattgaatcatttatgggttttctttgttattaagttgaaggggttctttatacattccagatattaatccattatcatatatatgatttacaaatatttttctattagcaggttgccttttcactctgctgatagtgtcttttgatgcagaaaagtttttaattttgttgaagtccagattatccctttgtctcttgttgcctgtactttaggtataatattcattgccaaatctaacgtcataaagctttcctctatgttttcttctgggagttttatgattttagtgttaaatttaaatctttgagccagtttgagttaatttttgtgtatggtgtaaggcaagggtacagctgcatttttctgcatgtggatatccagttttcccattacgatttgttgaaagactatcctttcttctttgaattgtcttggcaccctcatcgaaaatcatttgaccatacccaagagggtttatttcagggatcactagtctattccactggtctatatatctgtcttcctaccaatactacattgttttttattatcatagctttgaattacatttggaaatcataaaatgtgagaccttcaattgtgtttttttccaagacgttttggctatttgggggtcccttgaaatcttgtaccaattttagttttttttatttctacaaaaaatgtcattggaattttgttagagattgcattgaattagtagatcattctgaacagtattgccatcttaaaatattaagtcttccaatccattagcataagatgtctatttatttgtgcctttaatttctttttagcaatgttttgtggtattttttttcaacttttaaattgttttttatcacctaagtaaatttgtatttgacatttgggttacatgtggatgtaaatatagacatatcactcaacagacatatagaacagcaaagaggaatacttctattctggtttagctatggtctatattcctcctcatgaaataacctagacaaaaattaagaggtatgaaaagtgccaaatattgatttaatacattttcctctctttcttatcttttaaatatacaattgtgcactatcggtgtgagtgaattaaaataattctaatccagactatgagctccatgggctaaaagagagagacagcgtaggtgagtggagggcacttgtccttcatcaagctattcacacaaattaattgaagaggtagactaaattctctaagtcttgatgggcttagatgttacataggtcttcaagtgatgttttactttattttgctttaatttattgccctatatgttgtatgttccactagtcttgtaattgggccaaagtgaaaggttcaactagtccaagaatgcttaatataccccataaactgtctgaatcaaatatttttatttattgttcagccaaacacaactgatttccatctacaattattttttaagataagaaacagtaagtcaactgaaggaagagctggggtatcaagctgtagaacattattgcactttagcacactgactgagaaatgcagaacctcaggtggggtcttgtcactgttggctgcagcagggcataagcccagcctcggtgggccttttccaagaatgctctgcagcacctgacacattgctggtataccatctcaaagtcagggtcattcccttaacaggggttttcaataacaagttgttttggtgaatcatagcacccaagtagttcaattttagctttgcagtttttaacttgaggaaattttctattcaaatctctcaagttgctttcattgatatatggtatataatcaaatgtggtaaagtcttctttgataatctgctgagccatgtgattcatgggcataccatgcttcttcatgcaattttcctccctgtaatctggagggtttcctatttcatatgtggaggtcactgcacagtctatcctccaaaatatctgaaacattttgttcattacaacctttctgaaaattgcttctgcaaacaagtgactgactgcaatgggtgtatgtgttacccagacacatacacaacactgaattgggcacatgcttggccatcttctcttaagttttgctttatgcacttatgtaagccacaacttcattagggctcaatattttgccaatatgaaatgatcattttccaatttaacattgtataccttaaatctactttattgaatattggtgtgacactttttgattactattcttatgagtttacctgaaaagtatttgtcatatttgaatcattgtgctttaggtatttctcttggaatcagcatgtattgtatttctgatcccattttattaatcttgtattttttttttttttgagacagagtcttgctttgtgccccaggctggagtgcagtggcacaatctcggctcactgcaagctccgcctcctgggctcacgccattctcctgcctcagcctcccgagtagctaggactacaggcgcccaccaccacgcctggctaatttttcatatttttagttgagatggggtttcactgtgttagccaggttggtctcgatctcctgacctcgtgatccgcccacctcggcctcccaaagtgctgggattataggctaatcttgtgttttttttttttttttttattatactttaagttttagggtacacgtgcacaacgtgcaggtttgttatatatatacacatgtgccatgttggtgtgctgcactcattaactcgtcatttaacattaggtatatctcctaatgctatccctccccacacccccgaccccacaacaggccccagtgtgtgatgttccccttcctgtgtccatgtgttctcattgttcaattcccacctatgagtgagaacatgtgatgtttggttttttgtccttgcaacagtttgctgagaatgatggtttccagcttcattcatgtccctacaaaggacatgaactcatcattttttatggctgcagagtattccatggtgtatatgtgccacatttccttaatccagtctatcattgttggacatttgggttggttccaagtctttgctattgtgaatagtgccgcaataaaattacgtgtgcatgtgtctttgtagcagcatgatttataatcctttgggtatatacccagtaatgggataggtgggtcaaatggtacttctagttctagatccctgaagaatggccacactgacttccacaatggctgaactagtttacagtcccaccaacagtgtaaaagtgttcctatttctccacatcctctccagcacctgttgtttcctgactttttaatgattgccattctaactggtgtgagatggtatctcattgtggttttgatttgcatttctctgatggccagtgatgagcattttttcatgtgtctgttggctgcataaatgtcttcttttgagaagtgtctgttcatatcctttagcccactttttgatgggattgtttgtttttttttcttgtaaatttgtttgagttcatagtagattctggatgttagccctttgtcagatgagtagattgcaaaagttttctcccattttgtaggttgcctgttcactctgatggtagtttcttttgctgtgcagaagctatttagtttaattagatcccatttgtcaattttggcttttgttgtcattgcttttggtgttttagacatgaagtccttgtccatgcctatgtcctgattggtattgcctaggttttcttctagggtttttatggttttaggtctaacatttaagtctttaatccatcttgaattaattttagtataaggtgtaaggaagggatccaatttcagctttctacatatggctagccagttttcccagcaccatttattaaatagggaatcctttccccattacttgtttttgtcaggtttgtcaaagatcagacagttgtagatatgtggcattatttctgagggctctgttctgttccattgatctatatctctgttttggtaccagtaccatgctgttttggtgactgtagccttgtagtattgtttgaagtcaggtagcatgatgcctccagctttgttcttttggcttaggattgacttggcaatgcgggctcttttttggttccatatgaactttaaagtagttttttccaattctgtgaagaaagtcattggtagcttgatggggatggcattgaatctataaattaccttgggcagtatggccattttcacgatattgattcttcctacccatgagcatggcatgttcttccatttgtttgtatcctcttttattcactgagcagtggtttgtagttcttcctgaagaggtccttcacatcccttgtaagttggattcctaggtattttattctctttgaagcaattgtgaatgggagttcactcatgatttggctctctgtttgtctgttattggtgtgtaagaatgcttatgatttttgcacattgattttgtatcctgagactttgctgaagttgcttatcagcttaaggagattttgggctgagacgatgcggttttctagatacacaatcatgtcatctgcaaacagggacaatttgacttcctcttttcctgatttaataccctttatttctttctcctgcctgattgccctggccagaacttccaacactatgttaaataggagtggtgagagagggcatccctgtcttgtgccagttttcaaagggaatgcttccagtttttgcccattcagtatgatattgactgtgggtttgtcataaatagctcttattattttgagatacgtcccatcaatacctaatttattgagagtttttagcatgaaatgctgttgaagtttattgaaggccttttctgcatctattgggataatcatgtggtttttgtctttggttctgcttatatgctggattacatttatttatttgcatatgtttaaccagccttgcatcccagggatgaagcccaagtggtggctcatggtgggtaagctttttgatgtgctgctggattcggtttgccaatattttattgaggatttttgcatcgatgttcatcagggatattggtctaaaattctctgtttttgttgtttctctaccaggcttggtatcaggatgatgctggcctcataaaacgagttagggaagattccctccttttctattggttggaatagtttcagaaggaatggtaccagctcctccttgtacctgtggtagaattcggctgtgaatccatctggtcctgggctttttttggttggtaagctattaattattgcctcaatttcagaggctgttattggtctattcagagattcaacttcttcctggtttagtcttgggagagtgtatgtttcgaggaatttatccatttcttccagattttctagtttatttgtgtagaggtgtttatagtattctctgatggtagtttgtatttctgtgatatcccctttatcatttttcattgcatctatttgattcttctctcttttcttctttattagtcttgctaggagtctatcaattttgttgatcttttcaaacaaccagctcctggattcattaattttttgaagggttttttgtgtctctatttccttcagttctgctctgatcttagttatttcttgccttctgttagcttttgaatgtgtttgctctcgcttctctagttcttttaattgtgatgttaggttgtcaattttagatctttcctgctttctcttgtgggtatttagtgctataaatttccctctacacactgctttgaatgtgtcccagagattctggtatgttgtgtctttgttctcactggtttcaaagaacatctttatttctgccttcctttcgttatgtacccagtagtcattcaggagcaggtttttcagtttccatgtagttgagcggttttgagtaagtttcttaatcctgagttctagtttgattgcactgtggtctgaaagatagtttgttataatttctgttcttttacatttgctgaggcgtgccttacttccaactatgtggtcaatttttgaataggtgtgatgtgttgctgaaaagaatgtatattctgttaatttggggtggagagttctgtagatgtctattaggtccacttggtgcagagctgagttcaattcctggatatccttgttaactttctgtcttgttgatctgtctaatgttgacagtgggatgttaaagtatcccattattattgtgtgggagtctaagtctctttctaggtctctaaggacttgctttatgaatctgggtactcctgtattgggtgcatatatatttaggatagttagctcttcttgttgaattgatccctttaccattatgtaatggccttctttgtctcttttgatctttgttggtttaaagtctgttttatcagagactaggattgcaacccctgcccttttttgttttccacttgcttggtagatccttctccatccttttattttgagcctgtgtgtgtctttgcacgtgagatgggtttcctgaatacagcacactgatgggtcttgactctttatccaatttgccagtctgtgtcttttaattggagcatttagcccatttcatttaaggttaatattgttatgtgtgaatttgatcctgtcattatgatgttagctggttattttgctcattagtttatgcaatattcaacattcttaaagaaaataattttcaacccagaatttcatatccagccaaactaagcttcataagtgaaggagaaataaaatactttacagacaagcaaatgctgagagattttgtcaccaccagccctgccctaaagagttcctgaaagaagcactaaacatggaaaggaacaaccagtaccagccactgcaaaaacatgccaaattgtaatcttgtattttaaaggagaatttttaactatcgatagttattataatataaatatatgattttatttttctcatgtccacttgtgcatttcaaattttttatggtgtttagcattctgttaccattattattactatagttacctcctacctgaagttaagcattttcttttaatctccagtggttttctttaggcttaaaaatacatgcaactccatttctctttcagaattaacagtgaaactatatattcatatctctccttatgtaaggtaatactaaaataccttttttcctcctctccttcttcctcctacttaatctttgtttacagaatcttcgacccagtttactatgtttccttttttcttcttaacatcctatatggcgtctctaagatatatatttgcctttcacattcttttattttttcccatccatatctatagttacaattaagactgaattctatgctccaattgttttaatgattgttgaatgtttctttatactatgatttagccgctgttcatttctttattttgatggattttttatcagctggagtagctttttgagcaatataataagtagtatgatttctgagacagcatatctgagaacattttctgttgcctttatacattaattaaaacatatctgtatataatattcttgtgtcacagctttcctctctaatattgtttagaatttgctcgattgccttcttcctgtgtgtcatacaatggagaaactttcacctattgattttcctctcctcttttactttctctcttaccccctcacaactttctctcttctcccctcttttcttcatctccttatttcctcctcctttctccttctgtctggttcattttttcatcttctttttccttatgctccccttcttcctctttctttccttttcaccgtcttcctcctcttttccttctccttctcctccccttttttcttctcacttaccacatgcctgtttttctctttcttccttcttttcctccccttccttttccacttttttctcatctctcctctctgcctccgtttatcctcatactgctctttttcttcttctctttttgttctccttttcctttttctgttgtccgtcttcctcttccacttttttctcctctcttgtgctttctcctttgtagttatccttactaatgtctttcaacttaaaaacttccggagttggttgatatgccattaatttttctcaggattcagtgaggtctttgtatatgcaaacagaaacttgcactttagttcaataattttgtcatctattaaatatttccttattatttatatcccatttatttgcatgttgtttacaggaacattgatttttcatatgttggtattatgattactccacatctgtcacattctctgatcattttcaattcatttccttttcctgctcattctggggagttccttggtttgtctttcatatttcagattagattttctttagttttcacatgccttttagcaatattaatgactatataagttctacttatatatttttatttccccttcattctttcttgctttgactctgctagtacttctttcatttctcagccaatgttttatggatttcattttatagttttgttataaagagtccttgctgtagtaaattatagtatttttaaaattttggctttgttttccttagcatatgcttttctaacaatatattctttagtatctttaacacaatattatgtaaatatatttatgtattatttctttcataatgatatcttcctttatgtctccatattgttgttgttttctaatttggaaatatcttcatgtacttttccccattggttgttggggaacaggtggtgtttggttacataagtaagttctttagtggtgattagtgagattttggtgtacctgtctcccgagcggtatacactgcactttactatcccttgaccccttcccacccttgcccccaagtcccctggtccattgtatcattcttatgtttttcctcctcatagcttagctctcacatatcagtgagaacatatgatgtttggtttttcattcctgagttacttcctttagaataatcagtttttgtttagtttactcttccttgaatgtggagagctctttccataaacaggtgggttgattctctttggatttcctaatagtacatctggatgcagttagaatcaccctttcaagtcttaacctgggcttgtgagtacaggtggagactgtgatataaatttaaatccccattatcaaaactgtgccttagtggaattttttcttttgagttttttgccccagtgacaaagtttcattttctagcattcggattgatacagcctcaacaacagtaagagaaaccactgtgtaactttttgtaaccttttttttttcttggcgtccatattctctgctatttactgacaaattactattgttcagagaaaaatgctggtaaatgagggtttctgcatactgtacccagcagagctgtgaggaacctaggcattttccgttgttactgctctgaattactttgtctctgtaaatataagaagaaatccacggagatgatgcattttcaaagtgagaagaatttgaatctcccattgctgtatcccattaattttttccttctcccctagaaacctcccaaagagtttaaataagtaggtagcagccttccctggttcatgatacatgatgccccagattttaaaaaatggcctgttcatttcagtaggtatctgaaaagagtaaggatgaatatctgttctctctttataaacatattttcttagttatcttcaacttataaattttcaacctaatataaaaccattcaataatgattgcaatccaccctgtccatataaatgttcatcattactgtcttagtcttaggaatctatacattccttaaaagacatggacaatgccagcatccaagagaactgaaatctaaatctctgcttctaaagagcagagattcacttatcaattacattaagcaatttttacctttttctttggggttgagtatgaggtatgttcattgaggagggaatatctcatttttgttcactaagcagtctcaagctgctgtaattactttcatttcctttacaattactaatagatgtttacctgctataatgatgacagcagagtcatttgaaaaaggcagcattggcatgaggttgaacactacaggcaccttttaatagtgcctttaggaaatgcatcattaaacccattaatgtttgcatttaggaaatactttgtttaaaaatcctatgtgagtagcatcctacattcagaaagatcatatttggcccagaggctcaggttggaaggcaggaggacagtggcatgactaagaaagacaacaaggcatagttgtcatgagcatagacacaggagattgactgactggtttcaaatcctttctctctcacttactacctgtgtaatcttggaaaatcacttaacctgtctgtttttctcttttattatctatatgtagggataagaatagcaactatctcacaggcttattgggaagattatctatgttagagtttataaagttacctggcacatagaaagggccatacatctgctagatattatcattacggttgttgaaaaagtccttcatagtcaaaggaacagctctgagatttggagtcctgggctgaagaacgccagcatgcctgggtgatgtgggagagaagattgtagtctaggaagtaggcagctccattttgaaattgtcaccacatagctggatggcattagaaactattctgatgtttagtttccatatatgtaaaataggcatgttggtataaactgcaatttaagatgtttgctcatattttcactggaaacatcacatttgtaaactaaaataagcgaatactttgaacagataaattattgcgttaaactaaggaaagataggcaatctataattagagatttgtcttgtgtccacaaatctgcacagattcagaggagaaaataaaaagactgaattcaccagaagcctaatttatcctgaggtagaattccttccaattatctcaatgtaaagaaataaactttattaatagaaaatttactataagcctctgatttttaattttgtattattatttttaaaagtcttttaataaactgaaaatttagatgaccgtgggtttggtggtgacttctttaatacaagatcgaaagcatgatccataaaataaaacattgttaagttggaatttattaaaatttaacacttctgtgaaagacattgttaagggaacaagaagacaggtcacagactgggggaaaatctttgcaaaacacatgtaagataaatgactgttatccaacatatacaaagaactcttaaaactcaacaattaggctgggcacagtggctcatgcctatagtcccaacactttaggaggccgaggcgggaggatcacctaaggtcaggagctcgagaccagccctggccaacattgcaaaaccccatagttactaaaaatacaaaaattagccaggtgtggtggtgcatgcttgtgattccagctactgggaaagctgaggcaggagaattgcttgaacctgggaggcggaggttgcagtgagctgagatcacagcactgcactccagcctgggccacagagtgagactctatctcaaaaaaacaaaacaaaaaacaaaacaaaacaaaaccccaaaacaaacaaacaaaaaaattcaactatgaaaaaaataccaaccacctgtttaaaaattgggcaaaaattctgaacagacaccttatcaaagatttacagatggcaaacaaacatgagaagatgctcaacatcacgtcattagggaatgcaaattaaaacaacagtggaataccactacacacctattaacatggccacaatccaagacgccaatagcaccaaatgctggtgaggacatgaagcaacaaaaggtcttattcattgctgttatggccactttggcagacagttcgcagtttcttacaaaacacagcatacagttaccatataatacagcagttactcttctggtatttagcccaaagaattaagaatatatgcccacacaaaaatctttacataaatgtttatagctgctttatttataattttcaaaacttggaagcaactaaggtatcttctaacaggtgaatggatacatcaactctggtacatccagacaatggaatatgattcagtgctaaaaagaaaaaaaatgagctatcaggttgaaaaaacatggtggatacttgaatgcccattgataagtgaacattttatgataaacagaaatatgtatggatttttaataacacctgtgtcaaggtcttaaaagatgtatttgtggataaagtgtggaaaatatgaattgggcagggctactgtggataaatcagtctttggagactgaacttaaattctgtttatacatggatcattgccgttttgcatgtgagcctttcattcttttaattgatatgtgggtagtgacattgaacaggaatcataaacagttggatatgatctgaatttatctgacatccttggttttttgacagcacaatgttttaaatttgtaaatttgatattttcggtggtacctgcactctccagattacccttggtattattcgtttttttattttttgtcacctgctgactttataccctcacatactcaccgtacaccatcaagccattcaagttagtaacttcggacatagacaatctgaatgactctttgcaagttagtgggtactgtaaatccttgctattcaaagtggaccatatagaccagcatcgctggcataagtgaagtctcagacctcacctcagatatcctggatcagaatccgtatatgactagatctctaagtgtttttaatccacattaatttttggaaagcagtgcctctggttagaaaaaaaatgatctataaaatttcaatagcctgaagtgattggctgcatctaacaaaatacattttaacggagctacatatcagttcttgccttcaggccaccataaacttgtaaaggaaggtggttcatattaatgggactcatgaaaaagaaattgtgtaaatttctctacatgttataataaaggaacaggtcttccctgttatgataaaggaacaggaccagtcttctcattattaataactataaaatgggaaaaatatgctgtatgtaagcattttaaacacaaagagacacagatacattgagagagaaggtaaagatataccatgtaaacagtaagcataagaaagctggtgaggctatatcaatatcagacagaatggactttatgccatagagtattacagaggatagagggtcattgcataataataaaaggaacaaattcaccagagagaaaacatgtctaaatatttatgcacaaaatggagcaacaaagtttatgaggtaaaatctgacaaatctagtggaataagtagaaaaatctaatatagtcaaaatttaacttaattctcttaaaaactcatacagcaagtaaacaaaaaactattaaggctttataaatctgtacaataccctcagctaacttgacataattgacatttatggaacgctataccccaaaattgcagaatatgcagttttttagtgtgcatgaaacattcaccaagaataaccagtttttgagccatagaattaaatctcagtaaatttaaagagtaaaatcatacataacatgttctatccctacaattaattactttaaaaatcaataaaaataaacaatctagaaacttcacaggaaatataactaacataatgtagctaaaatattactgaagtattagctaaatattatcaataataaatatttagctaaagtattagctaaatgtttatctaatacagctaaaatagtgcttaaaggaaagtttatagctttaaatgcctatattagaaacaaaaaaagagttttgcttaaattcaggattcttagtttccttcctaagaggagagaaaaataaagacaagtttagttcaatgtaatctgaaagaaaaaattagaatatatataataacatcgaaaattagcaaagcttaaagttggttatttggtaattttaataaaggtattaaaccccaagcaagactaaccaagaaaaataagagaaaatggaaattcggcatgcgctgtctctgtctaggtgtatttaatttcatctcccagtagcttctgtatgctccttgaacatcatgaatagttttctgctcttcttcatgtaagttagtccatatttttagagcacctttctctctgcttttttacctagccaatttcactcatccttctcaaaggtcacctcctcagaatggccttcctagatacaccttaatttaaatcacctttctctattttttttaatgtcatagaccctatacttttatttcatagcaattattacactgtgcaattatgtacttatgtgcttacttttgtttaacatgcactcatatctataggcaataaaatccatggatctaaggactgaatttgtatttcccctattgtagaaccaatgcttagcacagtgcctgacagtatatataccctatacatatgttaattggattacttaattactaaaggcagacttgtgctttatggtccatatataaagaattaggaacactgggtagaatagttcaagataaagcttagctcagtggataaaataaagtcccttcttggtgtcagacatgtctgaagatgaataaacacccttgggaggtgacaaattatgcatccctgagctgtgtccataatagctaggaagccacgaatgtctcttataaattctgaattcatgtattttgtgctccctattccttgggttacatgctctttacagctctgccatgcaaagagcagctggcttgttttttttgtttgtttggttggttggttttggtttttcttatttatttttagattgaggacaattgtttatgtccatcatacacatcagtatcctactgggcaaagcgttgacaggacatctttttcttaaggtcaaattggagatattccacatcttttgattttttacttctttttattcttctattcctcctgtatccagagatccattagaattgtgtgaaatgcagtctgcagtttatgtactgtttcactttgaacagtgagattcatgaattgatagcatccacattttatagctgtgataagtcatccatatgcacaacctggctgtaaaatttgtattcctgttcaggcttatgcatacacaatatagtagtgagaattatataattcaggaaagctaggttccaaaggggcaagcaagttgtataactcccatgatgggtgcatacccacttctctcatgtcacatccagaactacagcatctggttgtcaaagaaacatcaagggcattgagtccagccttctgcagtagacgctgagttcttaaggaaggcaagagacagcatttccacaggcttactctatagactgttgaaaagatgactctcattgaggactaacctaaagttgacatattcaaggtgctggaaagtcccaaattagtatttctcttatcttctatgtttttaaaaatttagtagactttatttttttaaacagttttaggtttacagaaaaattgactggaaagtagtagagttctcatatattcatcttctcttccctccactttcctctattgttattattttttatttgtattaatttaaggggtacaagtgcagctttgttacatggctatcttgtgtagtggtgaagtctgggcttttagtcttaccatcactcaaataatgtacattgtacccattaagtaatttctcattgtcacctccctcccaccctcccacttttccaagtctctctctagtgtctattatttcactctctttgtccatgtgtacctatcatttacttcccacttataactaaaatgaatatgaggaatttgactttgtgtttctgagttatttcacttacggtaatatcctctgtttccatcagtgttaccgcaaaatatatgattttattcttttttatggctgaataatattccattatatatatatatatatatatatatatatatatatatatatatatatatatacacaccacattttctttatctagttaccagttgatggacatttaagttgatttcatatttttgctattgtgaacagtgctgcagtgaacagttatctttctgatatagtgatttgttttccgttggttagatattcagtagtgggatcaaatggtagttctatccttagttctttgagaaatctccatacagttttccatagatgttgtactaattaatttacattccttccaacagtgtataagtgttcccttttctccacatgctccccaacatgttacatttgtcattttagtaatagccattctgattggtgtaagatggtaactcactgtaggtttaatttacatttctctgataatcggtgatgttgagcattttttcaggtttgttgatcgttggtatgtttccttttgaaaagtgtttgttcatttcctttacccactttttaatgaggttctttgctttgttgttgagtaatttgagttctttgtaaattctggatatcagtctcctattgaatgcatgttttgcaaatatttattttctcccattttgcatgttgtctgttcacaatgttgactacttctttagctttgcagaaactttttagttaattcccatttgtctacttttgattttgttgcttacgcatttgcggtcttagacataaattatttgcctagatcaatgtctggtttgcccttggttttcttctagtatttctgtagtttcagtcttacatgtaagtctttgattcatcttgagttgatttttgtatatggtgaaagataagggtccaacttcattcttttgcatatggcaatccaattttccccacactatttattgaaaagtgtcccctttccccagtgcatgtttttgttgactttgctaaagatcagttggatgtagatatgtggctttatttccatgttctctattctgtttcattgacctgtgtatttatttttataccagtaccctgctgtttttttttactatagccttgtagtatattattaacatctttgtgtagcacatttgttacagttgatgagccaatactgataccttattattaacttaaggtcttagtttacttaagactcactttttgtgctgtatgttctattgcttttgataaatatataatgacatatatccatctttatggtattatacataatagtttcactgtacaaaaagtctctatgttctacctatgtatctcactctccgtctccccaaatattttattgactaagcagaaactgggataattctaaatatccacttgctccatacaccccagaactactctgttaatagagtctatccattctaccccctaaatctctcaaatacatgtgatttctatgtcttgatgactacttagtttattatcttgatgactacttagtttattataccaacctcctgacttacctttttctctcctcttttcactccctcaaatctttctccatattgtaagtacaaaattctttgtaaaataaattctgataaggtcagtcatcgcttattcatctctagtagttctagtgttcagattaaaattcagctttcttagcaaagcatcttcacttgatcatagccacctttacagccttacctttacagctacatgcatgttctgtgatgtctcaaatgctaggccttggggaatatctcaaagtacagttacttcctgtagcttgttagtcaagtgtttgaatttttcaggattcagttttgtttattttgtaggttttttcttatgattttctatgacagctcctatataacttctttaattggaaatttgactatttatttgtcctccttgtgtttctttcttcttcttcttcttttttttttttttttaacagggtctcactctgtcgcacaggctggagtgcagtggcacaatcttggctcactgcaacctctgcctcccgggctcaagttattctcccacctcagcctccctcctgtgtagctgggaccacaggcacacgccatcacaactggctaatttttgcatttttttatagagatgagattttgccatgtttcccagactggcctcaaactcctggggtcacgcaatccacccacctcagcctcccaaagtgctgggactgtagctatgagccactgcacccatcctctccttttgtttctatcactgaacttatttaattgaatttttactcttcatttataagttctgtctttcattaaactgtgccttcactgagtgtaaaaactgtgttccattcattttatagttctccatgctaaacaaatggcttggcactcagcttagcacatagtagggttgggtaaattcataaatgaacggacagtggagcttgagagactcagatctcctagagccagtaggtgaataaataataatgaaaacatactgtgaaagctgtgagaagaaaagaatagatgtagagagaaagctgcataaatggagctactgacgaaaccaccaagaaggataactgctgctgagaacaagctgccccattggcagctcattgcacagtgtgatgtagaactatcgagagggctacagtgacagtctcccagtgtgcagtgggaccccgactgcagaaacctctgaggtggaaacaaggtagtttagatgagctggtcattgcttttggtgttcagtgactgtggacccatcaatcttctgacaagcccagggcaagtgtcttggaaaacagccagaatatgtatggcacatttggggccatgcagagctgttcacattttaaaaatgagggaaagaaaataatttgttgataatgcaagtagtgggaaatttgggagaaagagaaactgtcttattgaaattgattgtaatagatgcgaactagaaggcagagttaggcacaacttggtagttagttaattcttcaggtaagcagaattccaaatttttcagaaaaaggaacattttgaggtccacagctatgattgaagaggggaaagtctttaaatcatgcagtgtgagtggtctaatcacaaattatctcagtgaggagggacagcaggcagatgccaggggctcactacgaggatctggggaatcagaggggtaagagacaagcaaggaaattgagaggtaatgcacagaataataaaacaaaacatggatattcactcaaaagtgtgtgtaaatagggccaagtgaaagaatgaacttcaattggtgaaaaatgctaaagaaaacaaaagttatggcagaattgctttctaaactctcgttggcagaggaggtcagtgtttaaggaatactgggtggcattaacagacaataatgtgaagcagaatcactgctgtcatgtaaaaaccattggttcatttttttgtgtgttagcacagtggcttgctggctgtgtgattttagatggtcactttatggatctcagtcttagctttctcacctccaaaatagaattaactagttcagtggtggattatgtcaattaattaaattagacatcatatgattcagcattgtgttggcattcacttggtcctcaataaatgaataaatctatctttcccttaatgccttgtaaaagcctgcttccagattcaattagaaaactattccaagactctggaacaatgtgtgtgtgtgtgtgtgtgtctgcactgctgataatatttgaaaatcagaatggcttattagagtatcagagatggttttatatctaactttttgagaaaccattgaattattgaatttttttatttgatatgccagtgaatttgatgtgcaactgtgccaacatttacaaatgatttatttggaagaagatctgtgaacacttagaaaggaaaaagtgatccctagaaggtggtaccaattcccgaagaacagatcatcttgagttaggctaacctctttcaatttgtttttgtttgtttttgatagactttttagactggcaaatcagaataattcatagacctggtatgtcttgatttcagcagtacattgtttggtggtcttagatagtgatcctgtggataaaaaggaaaatgtggcacatgaataaatagatttgtaattggttaaaaactgccctagtgcattaataaaatatatttgggttaacttggcagattattgcttagttgaatgtcataaagtgctgaccttagaaccattgtattcaacagtaatcaggcttagattaagagagcaaagacatactaatcaatttcacagataatatacaattttaaggatgtatatattttatgtaaattttattgctataaaagtacatattctttaaagacaattaaatctaagcaaaagaaaaatgcacaaatcaaagtacaaaaatataagactatattttaacatattattttattgcagatttaattcatagccagttcaaatagatgtggtgtattaaaacctttctccataagataatgttgataagttgggtgttattccttctgatatcttttttggaaaatctgagaatcattttacatacagcttttctgcatttaggttcttactgtcagtttaactcttgattggttgaattgtgctttcactagatatttcaacaaaaggacatagatattttattttctaaactcctacatttctgaagatttgtttcatttctggttctctacatatgaagaataacttgactggtagaattcaagtttatattctctagcatgtaagacttcacaagagagaaatgacctgagttatttttcttcctttgaatgtgtccttcctcctccttttaaaaataatattcctacaggattttttgacaggtttttgttagcatgggtaccagtaatatttgtttctttccattggttttccttggaatgtggtggcttctttcaattgccatgctatcttttggtttttgttgtatttgaggatttttttccaattatagctttgtttaataatatttactatagttgtttgcatgtatatcagcaacttctgaatgtttttgagggtggtgctgtgttctctagcctctataactatagaccttttattattgctttttttttttccatttctttgttattttattctggattcagagctagtttttgaaatgtgtccttcttacaatttatcctgttttctctactttccatgtggattcatttgagcaatttcaatttttcccttgcaattcattctattaaccattcccatttacatcttatcttgttgactttttgttcctggctctttccttattagcctatctgtaccagttccaaaatgcttataaagaaatggcacatttgctattctacaaagttgtaattttttgaatgatggtgtgatattttatcatttttatgattattgtattaggaagttgggagagttgtgcgtgctcgacggagacattttaaactgaaaagcctgggatggttaatatgttgactgatagaatcaaaattctaaatgatatcaacggggtggaacaaagtgctaaaaccaagaggataaatgaaacctgacaagctgcctgaaaataatcagccacttaagtacaggacaggggatgtgtatttccaggcttacacatcctgctccctgcttagcccattctctgtggttcctgagcagtgtcacccactccgaaggcttcaattaccaccaaatgctgaaggtgtgacatgtggggtcctggtccaggccagatacataggctcaacttgttcaacactgagctcattagcgcgaccctaaaccattctaccaacattattcattagtggaagagcaccaccatccacctggccactcattcacccttaaccccagcctgtccttgtttcccacaggacatcgtttgccatctagagatgcagaatgcctcataaatatgcctcaaagtctcctctttgtttcatttttgaagcaggtgttcacacacctagatagcttccttcctgctttggggggtgtttaaatctatccatttctaggtcatgtgtgatggcccgtgcctgtaattcaagcactttgggaggctggggcatgtgggtcacttgaggccaagagtccaaggctgcagtgagctgtgattgtgccactgcactccagccgtgtctctttttaaaaaattcacccaataccttctgagtatctttttaatgactaatcaagttatttcccagcagccccttttctccccaagagaaagtctgttgtgatctcctgtgagaagtccaagctgctgcagtagacaccaaaggcaatgatgtgacagccttgcctgccttcacggcttcccccttcccagtccttctcactcacctgatgtttcaatcacaagttgtctcctttctgtgcttttgcatttgttgttttacttttctatcctggaatactttactcacttcatcttcctggaaaacttgaattttccattcaataacctgtgctccctcctctgtgaatctgttttgacttaatagactgaacaatcctattttcctgggatttcccagcactattctcataccagcaatcacagccaactccctcatttgaaatcatatactgtattccccacacttttaaacacagtcatttcactctcagtgaaccagttattttcaggttagcccctctcccccaaaacacacattcagttcctcaatttgtttgtttgttttttgaaatttcatatttcctccaggtgaaagcctgctcttccttaaattgttcttgaacttttcccacttcgtttgtgttctttttaaaatccctcgtctcatactctctgtttctgccatgttgtactttattgccttaaatattttgtaatataattattgtactattttttctttttttttggtatttgagacagagtcttgctctgtcacccaggctggagtacagtgacgccatcttagctcattgcagcctcaatctcctgggctccagcaaccctcctgcctcagcctcccaaagtgctgtgatgacaggcatgatccaccgtgcctggtcctggttacattatttttttgcaaatatttttattcttaccatacaaattcaaattttaaaaaataacaattactaacatgtttccctctctccaagtaattaatattttcagtttggagaaaaccatttcaggtgtctggctctgcctatttttggatggatagagagaggtaatctagagaataaaatagtgtcatcttataaacctgttcttaataaaatcattacttttttttttacttgactttgaggaacaatgaatagaagtaaaactaaagatattgctgaagtttgaatattttttattacaagaaatattggttcctaaattatcctaagttattctgtacttataaagtcacatctgaaaaactgaagaagttgcagtactttcaactatcgggttcaagtattttaatctccactgtggaagataagattattatacacataaacaagtagcttcctatttccctaagtattactttccattttttgtttggtgttatatttatgttacaaaaattatgaatgtatatttcttctttgtaaccataatcatccagagttgataaatattaggtcctatgtgtaaacagattcagtgcttgttcaatacctgtattttttatcatagttcacatctcattaactatctttgtatgttttgtagaaaacactttaatgtgaaaaaaattaaaagtaatataacaaacaaaaatatatataatatgcatctgtaaataaaatataggattattttaaatattttatctcttaatttcttaatatctttgatattttagatcagaaatatatttaatatatgtatcatcttacttttaatatcttcagaatgtgtataagtagtattgaactgtatctaatttacaaatagtaggaaatcttctatgtattgccttttaaaatcaacatttggtacatataggactagtccatttatttagataccatatagtaaagtttattttaactatacaaccatatcatgtttatctattcaccactggcatttggattgtttcaatattttgccagtatgccaatattgacagtgctacagtgtgcattcctatacatgtcttgtgaacaacacatggatgtgttctttgtaatgcataccttgaaatagaatcactggctcaagtatgcattcaagtttactttttgtgctgtaaagtccatggactttgacaatctccactgatttccagtatctcttcaatcacataagcaggctgtgtatgtaactgagactccttctgggcattcttttctcctccagtgatctatttgtttttccctgtgcactataatacttttgtgcttgtcacacttatcttttttattttttccagaacttccttgaagcattattcttttatatgtattgaaaatcagcttcttatatttcacataaacaagatcaaaatagacttggggataattggcacctttatgcgatgggtttttctattcatgaacatagtatatctatctttccatttagtttttttttctttagttacttttatattgtttttcaataaaggtcttgcacatttttattaaatacatcactatgtatcataacatctgtattgttaatatgaatagtatatttatttctgctacattttctatacactatattgctatcctatcagaaaattactgctttccttcagcacagtgtcatctttgtcataaataaagtatgtaggcatgtttctagaattactatttctctccctttggtctgtctatctctgtaaaataccaaactgttttaatttatttaacttcctagtaaatctatgtaactattatatccacgtctccaacctagtttgtctctaagagtattttggttactcttggatcttttcatttccatatatgtttttggatcagtgttttaagttttaccaaaaattaccatagatagtttcattatattgaatttacagattgacttggaaataaattacatcattataatactgagttttctgacccatgtaattggtagtctatttattgaagcattctttttctcaatttaacttatctcatgtttttactgtaaagatatagacaccttgtgttagatttattacaaggcatttgacattttcatgatatcttgtaaattttactttatgttttacatttatatagctggtgtatggaaaaacaattgattttgtgtattgattttaaatccagttacttttctgaataggcttattaattttaataacttaactataaattctcctggaatttctgtgtgcacagtcatatcatttgcgaaaatcatgatcttgttacaatctttagcattttatcccccttttaatgaaagaaataatacctccagtacaatgttgaataaaagctatcatgggtgctgtagactgaattacatctctccccaaaactcatctgatgaagccctaacccctagtgtggtaaatatctggagacagagtctttaggaagtaattgagattaaatgaggtcatatggctggagccctaatgcaaaatgactgtggccttgtaagaagagaaagagatttctctcatgtgggatacagtgaagatatggcagtctgcaagccaaaagtgaaccttcaccagaaccccaccaggctagcaccctgatcttggacttccagcctccagaactgtgagaaaataaattgcagttatttaagccacccagtctatgatattgtattatggcagcctgagctaaatagtatggtggacttatgcattttgtttcttctctcaaaggaaaagcttttagtattttgccatttaggatgatgtttaatatgttttacagatatccattactaagttaagaaattctttcatttctatgaagctaagaggattttctttcccttaagatgaatattacattttataaaatgctttttctatatctgtgaagatgattatagttttttctactttaatatatgaatataacaaattacatagatagttctaattttaaaccaactttgcatttctgaaagaaactcaggttacaattgctatattaattttcttaatattttgtttagggtttttatctctatatttacaagcaagtttggctggtagtttttcattcttttatcacctttatcagattttgttatgaaagttatgatagtggtatacattgttttaggggcatgtatatttgtcaagttagtctaagctattttgtggtaacaattaaatgccaaaatatcttaacacaattaattctgacttgcttcatagtccattatagtttaggttgcccccttggcataaaaatgactaagatattcagaatctgcacatattgtgaggctcccatattaaatggatggtttctgaagtttccacgtaaagggaaataacactttatggcctgttctggaatttttatacataatttttgcccatattttattaatttgcatctagtcacatggctgtaatctaactgccagaaaggttgtggaatgtagtgttcctttgtgcccagcgagagaaaatagatgagcagttagacactctttatcacagggaaaaccttcattgtctattattatctgtaagagtgtgttgaagactggaaatatttcattcttaaataattggtagaacactacagtgaagctatctgggccaaaagttttcaatgtagaaaggtttcaaaatatggatttagtttttcttaatagttataggaatatttaagttttctattttattctcaggtcagattttaccagagttcttcaatgcagttcatggccagtgagcatgaaaagctaaagttacaaggatttcatggcaattttctttacaactgctgcttttaatgaggaaaggagaaaaacagtttgcttcaaagttgacttcatgacctttgtatgtcccacagtgccatgtttcagctcaccagtcctcaaggcattgcctatgtcccatgccaaatctaagagctctaaaacagtattgtgaagattcatttctattttctttttcagagcactattttaaaaatttccactcttaaggcatagagatctcgtcaattgttttggcatattgtcactgagagagacatggagttctccctattcactttgacactcacacattcctcaaaccacctgtaagagataatcatcttcatttttgtccagtgaaattttatgtttctattttttttctctgcatgcctataacaagcctctagaacttgctagaaagtgaggtctctcttggtgagtaagtttcagacagacagagaaggaagctctgttataatttctgtgtatctgagagtgatggtaagctgagtgcgagggctactggcccaggctgtcaccatgggaattgggtatcacttaagtactgattgaaaaacaaaaacaacaacaacaaaagtagaaatgtaggatgttcttcacatccttggaaagtgaaaactgaccacaaatgaaaggcttcctagccatgtgccatcttccctggggagggatgccagaaggcgaatcttcttgcacatctaaagaggattctcacaacaggcaggcttgtgattctttccaagcagctacattccaggagcttggctgcacatcagatacagggactcaatctgcccaaggctgtgttgctgaggccacacaggcaggcctgtggaaggccttggcctccattggagaagggtgtctgaggcctccatctcctctccacaccctagttggaaattacagctgttagcttatttttccacctaccaaagatgtttgtctgtgtttatagggaggtggagagagtggcaaagtgagttggcaattttttgtgatctgcaagcagtgatgtgctgctggctggtgacaattcagtgacatcacattgctagggtaaagttgtctatggtgggagtaatgacaccacagaaatcagggctttttattcatttatgtatttacctatttttggagggcctgttgttgaacaggcatatggtctatgaccaggtctatggtctactaatcatagaccataattgctgcacactgcactagactctatagtaagtgtcttacaaacaaatctcatatcatcttcccaactctctggaatgtggggattgcatttttttccatttcactgaaggaaacagaggatctaggaaatgaagagacttctcactgttatatgacagctcttggaagatctggtcttgggacttatctctatacccttctcatatcagcgtgttgccttttccttccatctgcaaggccttccctgggacccttgtcccttgctgcagagaagccagctggttctgagaaggcatgtctgtctttcttgttcttattatccaggatctgttgctgtctgctgcttgccccacccagtgaacactccaagacatgaggggtgggacaggtgctctctcagtgtttgctggtgcatgtgctgtgccggggaagaaactgagtgcacatgttgggtgaattgcctgaggtaccccagcattggttcaactctggttgagcatccactctgcacagacactgcgctgagcatgtctggggagggcaggccatatactgtggtccttgcaaaagaccctccatcgggcagcttgctgtttaatatgggaagtgagagagatgcggaaatgccagcagaacaacctggagtgatgtgtcaggtgcgtgggctgaaggtggtgtggagggaataattaccctcagctgcggtggcagaaaggggctgggctgtgaagaaggtgcaagatttagaaagtgacagtgcatggagcattccaggttaagaggcagtgcatgtggggtaaacctgggtggggacccacagtgaactctggggaagcctcgggtcgtgggaaagaagagaagatgtggagactgtcagacaaaggtctgagctccagccttgagaattaataaactttgggcaacctaacttttccaaacctatttcttttctttgttatttttctagaaacaaatgaagaatactaatatctgcttcataggtgttgtttgaattagaaaaaaatagataatacattttaaaatgttggtgcaatgttggacatgaaaaaggtgccagagaacccgattcagagttcctttgctcttttcctgggtttagattaggtggagaacagggctcatggggggagccaacttgaacatgagattgggccacatcatggagggcctgcaatacgagattagggatttctttcttttttaaattttacttttatagattgagagagtacaagtgcagttttgatgcatggatatattgcgtagtgacgaagtctgggtttttagtgtagtcatcacccaaatagaatacatagtacccataaggtaatttctcctccctcagccccgtgccacccttctgagtctccagtgtctggtattctactttctatgcccatgtgtacacactatttagctctcacttgtaagtgagagcatgtggtatttggctttctatttctgagttattccgcttaggataatgacctccagttccatccacattgctgcaaaagtgattttattattttttatggctgagtagtagttcctggtgtatatgtaccacattttctttatctggtcaaagataatgcccgtgttgatgggcatttagattggttccgtatctttgctattgtgagtagtactgtgataaacatgagcatgagtgcacatatctttttgatataatgacttcttttcctttggtagatacccagtagtgggattgctagatcaagtggtagtcttatttttagttctttgagaaatctccattctgttttccatagggcttgtgctaatttacatcccaccaatgatgtatacgcgttcccttttctctgcatccttaccagcatctgctattttttaggtcagggatttctatgctgaatggcagatggatgagagtttccatcaggagttggccatgatcatgtggcactttgggaagatgagctgcgtgaataggctggagaaggaagctgtagactcctgggctagggaaggagtgagggtgtagtcgccaggggcagctggaatggaggaaggaaatacagcagagggttactggtggagttggacactggtgggaggtgacctggaaagaggaggagggcaaagggtgttaagctgggcccttctgggtctgcctgcagcctcattctgcacctcctgccactgcacacacacttattctgtactcatgtttacccttcagtattttgcaggaactccagggcttccttggaatggctggaggaagccttgggcatcaaaagcaggagcaggttgttagtataggcctgacgtgggactgtgctgcatgcataggagcctgagatgccctgcccacggcctcaggactctttccgtgactgcctgcactcactggccaccacctctccctaggcccatcatggtcactgcctgcataattctatcatgctgcatcttgcagggggtggggctgcctcagggcaggcgctggagtgtgttaatatccccccactgactgttacagatggtttgtcatgggtcctgatgttggtttttaaatactttctgccttggttttatcactagcttcttgttgcttcttctcagctagcaggatggtattttctctggaaacattcttgcctcatccacttccattctcctgccagtaagacatttagtctaacagaccagggctccctacctccatatcctatattctgcatccttgttccttctgcctggaaaaccctagtcctctgcttctccagggcattgatatctgtatctgtcctgcaagtgtcaattcaattgttccctcctccagcaggcctccccagatccatttaggttgggttgaggaacagctggaaatgtgctcctgttggtcggggaaaagtcagggctgctaaactcagagccttcaaagtctgctgcaaaaatatgcattcttcattgtgggagttagtgaattcctactggatatactgtagactgagaaatcaggagggctcagacaaagccttcgacaggagtcatattttaggtatggcagaggaagatgagagagatccatggtttgggagcttggtcagaagcctgggagctgagatgctgtgctattccaatgagtaggtatttcaaggatgtgtctgtctggggttgataagcagaattccctggaggcttctgaaactctgcctcccaccaccactgagaattactgccatggtagttatggcagaagaatgttctatccctagatgtgatggggcatgtgaagctagaaagagtactggattaaatgacaaattaaatcatcagtgttgtttgagagtctgttttatgtcaggtgtagattacctataataatgcatgttaagcagcagcgtgggacttggctgagtttagttccctctcctttatccattgagagaaaaatttagttgcatgctcagggtgcaatttaaattacaaggagtacaaaccaaagttgcagaagtgagggcatattattattgagaactttaatggtgagaggaaggggagagaagaggattgtagaggcggtggtggcagagctaagggaggtgtccagggagatctggatgttacagtaattattttaggatgaggtggaccttatcatgtctttagacagagggtagccagaggcaaggtaaagaagggctgatgtatggggcaaagtctctaaggagactagagaaaatgaaaataatgttgagactcaagtagagaagagatatggtgcagagaccacatgaggggatgggacctctccctgggccaccaactacagcagccaagttttagacctcatctttgggtattggaccttggggaagtccactcttcccagttaacaatttctgctcctagggcatgagaaagggctgaagagaaccacagcccagagctagaattctctttgaatgtgtctttgaaagaggccggtggaggagagattagggaattatgtccagcctttggtcttttccttcaggatatcaacaacaacaaaaaatcactcctctgctgaagcatcccagttgaggttttctcctggggcaccttgtcgagcaggaaggtgatcattcccctttcctcccagcagaaccctgaccttcctgctcaactgaggcctcaattgaaatgcttcttagggagccaggaaggccaccccatgtcttgccttagctttggccaacttagagtctgagggttgttgggggcagaatgctggtggtgaagaaatgagattcctgcctttttagtgccaagtcactaaagaatgagatacagcatcctgcctgtacatgtgccagttaaatcccttcttctgtagacacaggtgctttcttggtgtctggggcgtttctggcaccatgtctgtccctagtgtctcaagatacactctatgaactcacttccctttaatctcaccaggctacaaaatggagcgtgtctctcttcacctccccccattgtgcatgcttttctcacttccgtgaatattcttagaggttattttccttcaacactcctcttttcactcactgctcagctcataaacactacttcgtaggggagactccggtcaaacttacgactccattctctccagggaaggtcccatctaactacaattccagaaaagtattgagagtacaaccttggtgggctgaaaatcatgtagacttgggtattcatctgatgtaggtttgtatcttctcagctttgtttcccctggcttttagatagaaatatcaatcccttcttcacaacgctgttgaaaaggttaatagagacaactatatgaatgtatctagcacatgataggtgctccattgaagttactgtttctctttcctttctctcttctcaattccccatattgatgcatccaggaactaagtgagctctgatccctactccccctcaactgaatcacaaggatgcctcatgcctgtcccttttcccactgcttgctggccactgtgtgccaggcatgctggctgggtgtgcattattggcctgccagcagccctcatacccagaccctggtcttaattaaaacttacctacctgagtcccactttatctcttatcctgttgaatagtttggcccttgagattttgttttagaaatagattccaggcttaacactaaggaggctctggctgttttggggatcagtttgccccattttgagtttatcagaggagctctgtcacacattcccaaatcatcaagagagtttagaatcttcagtccaaatacaggggctgaaaaattaatttctcagctcatctgcaaacagcagccactgtagggtcaggttttctcttaaggccttatttattttattactaccccaaacataaaaatgatggttctgctagctctgcctgccattaactaatggcaaacccagtgactaattgtgcttaaatctggtaagcaagtgaaattaattgtccttgcagagactggtccctgaggacttagaggagaacagaaatgttgacgtgcaaataaccaagcatgtgaaaatatggagctttatcaatcaagtcagacctccaggatttattgggtgcttccaaggtgctcagtgctgtgcctcattgctttctgcaacttgaaagtccatggcttcccagcttccctttgctgttctagggctagggcaggctcattggaagctgcgtctccattgtggtgtgtttgactgcgaagctttcttgcctgtagttgggattcctacaaacagaacttaagctgaggactctagcacaaatggtttcttgggtggagggggaacctcaggagaagcagaatgagggaaatagagtgaggcagggaaaacgtgctaagcaagaatatggtatcaggtggaaactagctccagcctgatcccgcaagaactctggattccaagtggccccacagatttgatcccaccctgaggcaaagaggctgcctttgacattcccatgtgagtcagttgctggctgtgggctgcggaagagataagatgggggtcatctccaggggaggcaggtccctccatggagggcagtgtccttgccccattagctgctggcactcacagaaggaacaggctcaaccttccaaaaaagattcgaggtgaaacactaaaagtatccactacaggtctggttgacctcccttccataagaagaaactcaagatatatccatgttctttgctgccatgaaaatctccttgctggaggtgatccctgtggcattgcacagcctttttagcgaaaaccacttggtcacacaggcaggacaggaggcagaatttgccaaaggccttggggattctgaccccagggcctgactgaatcttcagtttccaattacatcttcacatgcaggtcccagccctcacaaaatgcatggaacacccaaagcaacatggacaccacccctgccctatgactttgcctaatctgtcaaaaagcaaacctgtccttctcatgaacacctgaagctgatgcctccaatttagtctatgtgggttaatgtcacaccaggctgcatggcaattttataccaggggtcctgctggacattgaaagaacattattcttctctctgaagtttgaatgttgaattcattgtgtttatgatctccctctgtttgagagagataaagatgggaagaaaggtacgagctcattttccaccacatgaacacattttaagtagcttgctttgtcattttctcagatacctcccttaaggaacttgaggcatagtctgaaggactgaatcaatgaattccccaagtgatacacgtaagatgtctgtcattcctgaaagcagcctttctcaccaggagtcatcctggatccctgtggtaggttcaagctcctcctgcattattttgccccaggctgagatcttcattgtcctttagcctaggaggatctggaatagctggtgggtggagggaaaagaaaggagaggagaagggcactgccattctagacttatcatgcagagttcattgctagccctaatgtgcctcatcaatccctcctggctgcatagctcacgtgtgtgcagctccagagcagacagcatcactaggtatcttctagaccctccaagagtatgaataatttcttaaaactttccctgggaataggtttctttttttctgggcaattttcctaagaggaaatgttttcctaagaggaaatgacacaaaccagcagcattgaacctgatggacggtctcttatcttctccaaaacagctgtgaagctattgatagtgcactgaacgtgaacccagaaatgagccctaaaaaataatttccaataaactccaatggaatatatgagcagtttaagcagaacgatactctaaatttctgagcttcatgcccagagtttgtcctacatatgtctcctcctgagataaaggacatagtgagtctttggttataatttgcattaataatgattgagcttctcattagcatacactgggcatgtcagtgtcaggtaatccatttgactctgctatggatggatttatgctgcacaccaaaaaaaaaaaaaacctgcaattttcactcttaacttctcttgtactaagttgtgtgacagaaagaacaggtgatatggcaccacaaaatattaactatgtgatcttgaataacccttaacctctcagagcctccagatcctcatctttcaaatgaggatagttaattgcagttgatttcataggatagtcatcttgatcaatcaatgtaatctatatgatgatccctggaatattctaaaatgtcacaaaagatataatataagcttttctaatccattaatctctcaaataagactgttgtaatttttctgtcttgaactttgagatgtgcagtggggtatgttgaagctgttcttattcatcggatttcttcttaacacacatttcttgggcacccgttctgaggggggctttctatgggacatctagaaccaaatggagaaagaggcaggctttgttccctaggcgaacacagggggagaacatatgagcccacagctttgtaactcttgggcaagtcacagcacacaagccaaagaagaagcccagagagaaaagcaagcttacccatcccgttggaaatatggatagaaggaaacacaaaggacattgcatctgaactggccacatctaaacctactatgtcaagtagagaaaggtggaaaaagtgaaagaccagcaaactcattttaacctaaggttaaaaaaatggatccattaattaagaagagtgatctgagaggaatttgctcaagtccagatcatcttaataaagtgaatattgcaataaactggtcccatctaaacctgctatgtcaggtagagaaaggtggaaaaagtgaaagatgagcaaactcattttaacctaaggttaaaaaaatggatctattaatcgagaagagtgatctgagaggaatttgttcaagtccagatcatctcaataaagtgaatattgcaataaataaagtcgcaggaattttttggttttccagtgcatataaaagttatgtttatattatactgtagtctattaagtattcaatagcattatgtctaaaaaatatacatactttaattttaaagtaccttatgctcaaaagtactaacccccacctgagccttcagtgagttgtaatctttttgctggtggagggtttgcctcaaagttgatgtctcctgactgatcagagtggtattgctaaaggtaggagtggctgtggcagtttcttaaaatgagacaacagtgaaacttgccacatcaattgactcttcttttcatgaaagaattctctgtagcatgtgatgttgtttggtaccattttactcacagtagaacttctgtgaacgttggagtcacacttctcaaaccttgccacttcttcatcaactatatgtatggaatattctaaaccttttgttgtcatttcaacaatgttcatagtattttcaccaggagtatattctatctcaagaagccactttctttgctcatctgtaagaaacaaatgttcacccatttaagttcgatcatgacattgcagcaattcagtctcatcttcaggctccctttctaattctagttctcttgctatttctaccacatatgcagttacttcctccactgaagtcttgaacctctcaaagtcatccatcagggttggaatcaatttcttgccaactcctgtttatgttgatattttgacctcctctcatgaattacaagtattctgaatggcacctagaatggtgaatccttttcagaaggtttcaatttactttgcccagatccatcagaagaatcactatctatggcagctacagccttatgaagtgtatttcttaaatgataaaacttgaaagtcaaaattataccttgatccatgggctgcagaatggatgttgtaataacaggcatgaagacaacattaatccccttgtacgtcttcatcagagttcttgggtagccaggtgcttgtcaatgagcaataatattttgaaaggaatctttttttttttcctgagcagtaggtctcaacagtgggcttaaaatattcagtaagccatgctgtaaacagatgtgctatcacacaggccttgttgttccatttacagagcacagaggccgggcgtgggggctcatgcctgttatcccagcactttgggaggctgaggtgggcagatcatgaggtcaagagatcaagaccatcctgaccaacatggtgaaacccaatctcaactgaaaatacaaaacttagctgggcatggtggtgggcacctgtagtcccagctactcaggaggcagagacaggagaatcgcttgaacccgggaggtggaggttgcagtgagccaagattgcaccactgcactccggcctggccacagaggaagactccatccaaaaacaaagcacagaaatagtagattgaacataattcttaagggtcctaggcttttcagaatggttgctgagcattagtttcaacataaagtcatgagctgcactagtttctaacaagaaatcaacctgctcttcaaagctttgaaggtgttttcttccaatagaaggccattgcatctacactgaaaattggttatttggtatagccacttatatcaatgatcttagctagatcttctggatgacttgctgctccatcagcacttgctgcttcaccttgcactgttatgttatggagacagcttcattccttaaacctcatgaaccaacctctgctagcttccaactttttttcctacagtttcctcacctctctcagccttcgttaaaattgaagagagttggggcattgatctggattaggctttagcttaagggaatgtcctgttgatcttctattcagaccactaaaactttctccatatcagtaataaggctcttttgctttcttataattcatatgttcactggagtttcacttttagttttcttcaagaacttttcctttgcattcacaacttggctgactggctaagaggcctctcttggctttcaacatcccttcctcactaagtgtaatcatttctagattttcatcaagaatgagagatgtacaactcttcctttcactcaatcaggccattttaagattattaatcacctaatttcaatattgttgtgtgttggggaatagggaggcctgaggagagagagagagagatgagggaacggctggtcagtggagcagtcagaacatacacaacatttactgatgaacttcaccatcttataagggcagtttgtggcccccaaagaatcacaatagtaacatcaaaaatcactgatcatagatcactgtaacagatataataataataatagtaataattttaaaagtttgaaatattgtgagaattaccaaaatgtgatggagacatgaagtgagcacatgctattggaaaatggcactgatagacttgcttgacacaggtttgccacaggtcttcaatttgtaagaaacacaataactgcaaagtgcagtaaaaggtggcaagcctgtgctaccatagtcagatgacagggaaagaaactgagctgagagtgtcagtagaaatgaaaagaaaggagggtgttggcagtagagttctgttgacttaacaaggcaaaggtaggaaaagaaaggattaaagagtactaagactttatatttgggggattgagggtggcagtgtcctcataggacatagggaagtcaggaggtgagctggttttagaaaaagaggattgcctgatggcattctcagagcaggagatttctgttttggcatcctggaggcgcttatctcagccctatgcaagtaagaaggccagaggttaagggaggagtggcaaaccatctatgactggatgcacataggcaaagcagagggaagagaatttgcaataagcaatgaaaatgaagaggtgaaccatggtcaagcattgtcaagttgggcatgtaggtcagggcagtttccagaggtggtggtctgtgtagtctagtgacccacccagcaagatggaggaccctgtgggctgaagggtgggaacagaagccagttggccacgagcaggagatgaagatggagggcctgagatgagggggcttcaagcaactcgcagtttcttctcccccttgcagtcatcctcaattttgtctttatagacaaaagagactgtgccttcatgtttgtttgggtctaggtgccattttaaacttctgatatcatttctgaccctttttctgaggtatctttcttccctggtctccttttcttgaaaagcagtgttccttcagctaattattcaagatagaaatacagtgggcttgtttaaaaagcccattgaaatcccattcagggggcaggcagaatcctcactgctctgtttctaatgcaagtctcagcattggtgcccatttcagagcattttggtctttgaatcgtctacacaacatcattttccaagtggattcctagtagctctgttttctgaagatggaaaaagatgggtgaaagaaagttgaaagttttctttaaagggcttttcagtctttcctgtgttattatgaaccataagtctccaagaagggctgtcgtgtccagcatttcccagatgtatttattaatgaactatttttgaaaaatcataaatatgtatttctgaataaaaaagtcaagaaagacaattcaataaactaactagaaaaacatatttgtaccacatttttaaagaaaacaaaataccttgttatgatgcaggtgtgtcagtgttcctcactgtaagccaaaacacagcagaatatgatgctgcatgaaaagcagaatcaagccagagcagtctactttccctaagctccattcactgattgctgatacttcaggctcagatgttaaacagtaaacttggttgaaagagcttccattttagtaatctaagttactgcatggaattaaaatattaaaggtggcttccagttggagcaggacacagaagggggcctcaggataagatccgtctggggatgggagctagcagtccttccctagacagcctgatctaaggatgggccaaatcaggacctacagagcagggcaagtcatgagaagcggggctgggagtcaaacgagattcaagaggaagtcatggatgaaaaatgggtccggagccagggtgagggtgtgggtatggaggaggaagccaggggcttcagaaagtgtgaactccactctctgtagacgtattttgcttctaattttcccagccaacttgtccacatttgaaatcatctgccttttatgcccatcctcatgaccccaaaggggcccttggagccctctcagattcccagttcactcctctgtgatataatattgacttccccataggtggtgattatgaagagatgctctctgtaaagtgctctacacattgcctggctcatgggggcccctcaataaataggaaactcccatcatcctccacccctacttacttaacccactgcccatttggagtgggcttggtggaatcaacagagaagacggtgccctgcatttgggtaatggttatgaaatagccgttggacatggaagacaagtcaggcctggtttgggccacatgcttactcaggcctagaatggggaaccctgtgattagcccatgtgtcatcctctggtggaaccaaggggatttctaacttggataatgtttttcaaacacctggctttgccagtgcaagtccacagtggttgccaatgtgtcctgcaggtcactttttttctctctgtcttcctgtgatctggaccccttgagcacactccattgtcctgacttagaggactcacaggaaggatcatgagctgttgagaacacagcaaccaatgtgactttttgatgtgcagcgtagagcctgaatattggtgacctgcctttagaagcagtgtcttactgccattgctgaactgtgagataaattcttcctttaagcaatggcaggttttctagcagtccctcaggcattgtgcaaagtccactgagtgtgggcagagtcctggcagactcattagctgtgtgtccttggaaagtgactgctttctgggtctcattttttaggtctataaaatgaagggattttataagaagatttctaaacttgcctcccactctgacagtttgtgagcttattgacaacttagttcaaactctcaccttaaacagtagcgtctaaagaacatctcagaagtggcttctcttggctccacacactaagaaaagcaggacaaatttgatttggagtcaagaataggcacattttcctgcttccacttcagagctccacacagagaggacacacatcagcccacagatgcccacaagggtagccaaccacacatatacacacaaacacacacagagtcagaggcacatgctccgttgctcacatatggaatgaatctgactgttgtctatgtgcatttctttcttttactctggtttttgtttttggccaggaagggccaggttgagactgcatttccttccctgggatccctctccgagcctccctgtggaagcatccccagtctcctgtgtctgacaggctgtggaatgcacgtgccaatgccctcacatggctaatgcaccttatctcataataacaacagccacagtacacagcaggttagccggggattttcctctgacaaaggggagaactcagcaggtgagatggtatgtgattctgcatggctggcctttgcctagggcttagggatggggaatggtgggtgccctccagggagagcactggctcagcatgaatccatagaaatggagggcaaggggagctgtcatttcctgcagagcggggaagcctagtcagacagctgggaacagaatactactagaccagttatcagggtttaaagcaatgatatacacgaacaggctggactcatccactcattcactcacaaagtttttcttgaccacctaccatgtgctaggggctgtgctcagttctgggggcacactggggaagaagccagacctgttgcatgtcttcatgaacttaaagtgcaggagcacggttaggagtccatgtgcaggagccagacagcctgtgctcacatgctggatccgatattgaatggacatgtgactttgggcaagctaattaaccttctgggctccagattcctcctctgtagactgagaataataatagggacaacctaaaagggtttttctgtaaatactgataacactgccctacacagagtaagaactcactaataatcttctattgtttgtgtttattctttttttttaaaacagcctactaggggagtaggctaacaaataaaagacattgttcgtctctctctctctctctctctctctctctctgtgtgtgtgtgattttagaaagagttgctacatatcagaatgcctgcctctacctgaaagtcccagaggatgcgggggaaatttttcccaggaagaagagcagataaagaatagacgggcttcccatgtgctagatgtgggtgcagatttacactggagacagtcacgtcaatcacataaccgcagagagcgaggtcttcactactttgctgttatcagtgatcctgggttctcttctgtgtgtctgctcctctctgcctctgcttagttccctctctttacagcctaatgaatgttctctgcatttcctaaactagggcagtagcactgatgttggaggagtagggagatctgcgaaatattgtggggctcaactcggtcaggcctgttggaatatgacaggtgggagaaaggccagagtgaggggcaaggcagcccaggtgttagtgcgagacctgggtggatggggacacctgcacctgatgtgagctgtatgggggaggagccagcttgggtaggcagaacaaggtccagttgagactacgtaagtgttagatgcccatagatgtccaggtggagatgcccaacaggtaatgatgacagtggggaagctcgggatgagttgaagtcacgtcccctgtagtaaccgaaatcagtcacaaagtacagttggctcttgaaactggtttattgactacagtgaagttcacctaaataaaagtgtaaaatgagcacctctaaaatcatcccccatcccctcatgccttacaagccaacctcaactaaatctcttacttctccacccaaggttgcaggtacctgcccccgctggggagaggcatcaaagtcccagtgcaccctctgccagtgggagggatggcagcaagaaatggccctttcaaaggacatgctgaccctggagggaggtccctatccacaccctccaggagaactgttctagagctggcccctgagaaacatctgttcatttcaccctgttctttcatgctttctgtttcagcagatcagtgtaggggtgtggttttagtcaaacctggttttcaatactggctgagacattgactaaccatgctgggcctcagtgtccttgcctataaaatggcaccactctatctctgtcagtatagtctggaaatttagtgcataataaatattcatttcatattagctccctccagaccatatcagaggacgtttacaaaagtggtggtgtagttctttacaaaccaggtagaaaaatcacatatttgctctttgtctagtttctttctttgggtttaggagacatttgccagaataagtgccttgacctccaggggtgagctgtgcaagctgtgcacactcctctccaccctcgccttggtggaattatgctgatcttgcctggcaacgtgcctcccttcccgagacagcttggagatgcatatttatgtatttccagtcatcaccccaagagctcagattttcctgtccttggtgtcactttaattaatacactcccgtgtgctgggtgacaaaattaggttgcaggggtggcaggcgtttatatcacgaagggagagaaaaaaggtgttttgcaccattttccttcttaagctctgttattaatctttgcaatcaatactcctttatttttggctccagaagatggtggggtggaattagactgtcaagcaatttaagaccacatctgcataagtaatagagatggtatgttccttttgctctaggtgaaaacatgtgtccctggccagatgtggcagggccagactctgtgagtctcatgccagctttatgatatgtttgatttaggtaaagtgcctggaacctgctgggactaagttgttattaaacaccatctgcagttttcagtttaattaatataataagaattaggatcccatgctttaattatcatgttaaccctttaggatcatgggaagaaggagggaaacatgggagggtggaccagggtagctctttagaggactttggatctgtaggttgacgcccttcatcctgaaccccacagctgtaaacatgtgtggtgggctagtcactgcccaggtgtgaccctggggctgttggggtttgcttgtgtggaaaggaaactggaatatatttgtccaatagagaaggagtctacttaaatatcagtcacacctggttccccaaccctgtaagggaaattaccttaacaacaacagtagcactaataataatagttctaataatgacgtatcatttattgaggaattacttgcattttaatatacagtgtatactgtataatctgtgtgtgaatatatactgtgttatacaatatattctgtactagaaactgcctaagtgctttccacaaattacatcatttaatttttaccacattaagttctgattgcttatgaggaaactgaggcagaaaacagttaacatacctagtgtgaagcaaaacttggattcaaatgtaagcttatttgaatcaaatccaatgcttgtcattaacatacatcactcaataaaacattcctgttgaaaagttgaaaggaaagacttcaagtagagaggggacctattgcgccctcctggatttcatttcctttgtgcgaaatgaaacctcagattctaatattgctgccactgccacttccaaggtacccatgcctgtggcttcaagctcggctgtcagtgaagagactgagctcattgcttgtgttctccaagcacagctaattttggctggtacgttgacaatgcttcctcaaaccatgcaggataataagacataaatacattcagacattacaaaagataaaaaactggaaacagagatggaaaagtctgagatgtaaggttagtcttaaagtaattctctgattctaagggaagagcattttgaggtaggcactgctaggcagaaatctttgctgccccttactggctacaggaccacagacaagtcacctatctcatatgcctgggttcctcattggacaatagagatgctcatacttgcccttcatgggtttcatgaggattctacccagagcttggcacatagtaggcattcttttaaagcatgactcttcttactggaggctctcacatgttgactctcagactaattgcccaaggaggttatgatcctctgactcccagtcaaaagctccctcccgggcctctcagtgccttcatgtcatgctctgctgcacatcaacattgagtgactattccatatggcaaggttcccctcaagaagcatggcgccaggaatgaaatcatgctggaaaggacactgtgccttttatactctgggaggtgtctctttacaggttaattgactcatctattcatttattcatccagcagggagtatagagcacattcaatacctggattgggctgggcattggtggagtaacagtgctacagtaacattaccttgtaaccaacataatgaccatgttgcaacagttgtctatgaccagaaatcatcctattcatttattcactcatttattcttacatttctataataaagagatcatttgctcctgtcatgcacctaacattgtgtcaggctctggagataaaaagtgggtgagaaagcatggtctccaccttcatggagtggcagttggcaattcagaggagcaggcagagaagtgactcagtacagcacagcaagacgagtaccatgattagggaagtttctgtgattgtcagggcacatgggggctgtattagtttcttaggggtactgtgaacaaagtgtcacaaactgagtggtttagacaacatttattgtctcacagttctggaggctgaaagtctaagatcaaaatgtgggcagagctgatttcttctgagggctgtgagggagaatctgttctcacctctcccccagcgtttgacagtggctggcaattttggtgttctttggcttgtagatgcattaccctgctctctgccttcattttacacatggcattctgcctgtgtaggtatctgtgtagaaatttctcctttttataaggacactcgtggtactggagtagggccactctaatgacctcatttaacttgatgacctctgataaggactccccaagtgagatcaaatttataggtactaggggttaggatgccacatatttactttggggggatgcattccaacccatcacaggggaaatgtcttgaacagaattttgaaggtagtgatgtgttccccaagatgtggaatgtgaggagttgtccgcatgtttaggaaggagaactgttccatgtggcatacgagagggaccagaggcaggagagagcactgtgggcttgggaaacaaaatcttgcacaggacagaacataaagtatcggagcggctgctggaggactaagtgggacaagtccttcgaggcctaaagagtcagatctggaggggtcccttcatcctgaggagagtggggacccatgaacggcttgtccagacagcttcatggtcagaattcatcccaacctcacacagagaaccttttcatggcggcatggtggatatggtgcttcctacgacacagtgcagccctcttctggtaggccacattacccattaggccctggcatcaggaaaaatgtcatacaaggctcagttcaggcatgggggaacatggcttcttccctgggagaggagccctatggtttggaaggagaagggagcctctctccggttggcattggccttgtgggtggggaggagtattacggagggagctggggatccagtgtgcagggcggagggaggcagggttcggctgagatggctccacccacagccgcgttgctggcccagcggctcctttcactgcagtcatgtggtccctgaagccccctatcctggcgttggagccctctcctacctgggggtctcctcaagccaagcaccctctggtccttttgcttttacttttccagcctgtttagccaaacccatgaaggaacatcagaaatacctgtacagagacctgtaggtatccctgtttgttgacctgactactgtctctggaataggagaaaggagagtaaaacacagatgaggcagtgagatgtgtgtcttatacatcattcatccactcaaacaaatcaggatgcaacatctgctgagtgactcttgggatttcagtgcaaagattcaggtacagcctggtcctgatgtgcccggctctgaatccaggaaacacaggtggctgtgttcctcctacctggcctggatgccctgtgaacatggcagaaggaaaccattccagggagaaccttgtttttggcagacctagtagtctagagagacagcaggcaaagagagcaccatcttggaataatacagtcctttgagggttcccttggaatgctcatttctcttgaagaatggcaagcagcttccacctaaaattaatcattggcttttcctgctggaagtctctcttctcccacggaggaagacattggctttgctttgggtttgtggctaaattttgtgcattacctttcatcccgaggcactgtggggacattattatgttgttaagagtcagaaaagcccatagtgacctgagctagtgcctttgaaggtggttgttttgctttgccccactgggtgcattgtggctgtagccttggtgtgacttggggacaagctccctgggtccctgcttctgaggaggtggctgccagcactctgcagaggcaaagctcctggtgtctgagcacactacattttaatcattagaggtctgttctctgtgagatcctccctgtggtagctctgagtctcaacagacactgcaaaatgagattctagttttcagagaaaacagctgtgtttcagagaaaaaagtgcatgatgctgcttttctggaagagagaatcctaaacaaagtaagtcttatagttccagcccaggccatagaatcatgaaatatcacagcaggaaaaggcctgacggatcatcttgtccagcgggtttctgtcacagtgtttacagggctaagcagagaatgtaaatgtcggtctaagaccagagtgctgagactgtgatgacccagaaatcacaggcccgggctaaaaaaaaaaaaaaatgcagattcaaagcaggcaaacaggaggctagccaaaccagccacttcttgactggccatgcaggttggcagtttacaagcactgacgtagcatcattctctcatttaatcattggagaaactgaagctcataacgatagctaacacttaatggatgcttcccacagactggcattatgcttagtgctctgcttgaattcactcaatccatgaatattcctgttgtgtagatgagaacactgaagcacagagaggttaggtagcttatccacggccacagagctagcaagacgtagagtgatatttgaaagcacactctgactccattgcctaggttctgaactccttccctgccctgccactccagcatgagttctcctaaaagcaaggaagtgccatgttccctgggcagggtccagaatccaggccctggactcctggtgtgatagcatctgaactgcactgtgttgcttcccttgtttcctctgcttaagaggtttgatgtttagaaccagacttcagccagaacagcctggcatacgtgatcagctctgctcatgatccactgtagggtcctgcataaattggtatgagtctctaattctctggggaattcaccttacctcccagagtcctaagaattaggactgttctcccagggctgtcacaaggatcccatgaaagagggactggcaccaggtctggatatgtttggatatccccagatgtttgtgtccatctgtgtactttccaacaacctttccatggtggtgtatctggtgttctgtagcgggatgttttgctcccattggacaaacactgttgaatactggcagagttatcctgagtgtcttgcctgaaccctaaaaagtcaatgggatgaataattacctcaaagaacaaaaaacaggaccatgctctatcctgccagtatcctggtcctaactggggcataggtgggctcccattgatgccccccaggcattgcaggcacctgcagcagatagtctctgtcactggccagagagcatgccaggtgaaagttatgtggcatgtggagctcttggggtggtgtggctggcacctggcattgctaatggtgccacaagcgaaatggtgtccaagataaaaacagctgtaaccaaacattccatggcatggacatcatccctaattggagctggtttgggaagatagctcaggcatcttggagatccaggcctggaacagcttagcatcaacagctcaacaagctcaacttggctctggcatggaccagcttcaaaaacttcataatttccttatccataaggtgggaagaatagcttatcacagagggtggttctgaggatgaaatgcgctagcccatgtaacagcacatggcacagagtaggaatcctcccattctctgaactcagacaagactcatcaatgatagagcacaccttctcctcccaattccctttcctaaacttcccatcagagtctatatccttgctaatgtgatttttctgcaaactgattcagaacggctagcatcttatagcttcacatttaattacagctggttttgcattgttcaatcactggcccatgtgtgctagtattttccctccagctgtcccacaagggaagagcctcagtctgttttcttgcaccatgagtgctgactgctcagatccacaaacaaactcaggcaggcagatgtcttgtgtgctgtgattccttcaccagctgctttggttgggttctcagccacatgagtccacctcctttggggtccccatccaaccactgaggaactcacaaccactcctctattttaaagttagtcatagcaaatggcataccctcatccaattgtcctggccctccagcagcactctcctccatctttcctctcttcttcctgccctggggcccttgagtatacactcttacatgaacacacccaggccggaacaggtgtgcacatttatgcatgcacacacatgtgcaagcacatggattcatagctgcttctcagctctgcattctaaaatatgtgtgacatactttctgcagtggcttccttaactgtccacagtatagaatgtctccacccactcagctcacacattctccagccccataattgtctagggaacatcgatagcttatcatttttccattatctttgcacttccacaaaaactcagttataacaatcctctaagtattttatggacaattgtcctgcaatcctattcttagtgcttagtaatataccatttctgctgtctcctagtaaactgttattagctaccagaagatttctctttctcacacacatccgtgatttaaacaatgcaatgttatctttgcccagaacatttttttatttctctcttctatatgtccatttcctgtttctccttaagcctcagcctcagcctcacccttcccatgaaccctccctctttgcccacagtcccagttccttgtctgctaagctgggacaggttcaacttcatgttcccatgactctgtgcttcattctagcaccgtgttttgcatgatgtttctaatgatccatgtgcctgttcgccctcctcacttagctatgagctacttaatatcaccataggatgatactaatatggacaggtttttgtatcaagcagtcctgagtatgaagacagctcttgtacttgctgcttctgtgaccttccataaattccttaatctcctgaagccttgattttttaatctgtaaaatgaggggggtagaaataataactttatgaaggggctattgccagggttcaatgaagcagtataaagcaagtgttagcagagggtctggaagttagtctcattgtatctttcttctggtatatcaagtgactgctggagaagctgacacactagagggttcagacagacatttgaaaggaaggagaagagggaaggaaagatggtgaaaactaatattagcagggagagaagagactcaggctgtttgtctggagcacaggatgacacaggctgtgccagaaggggaagaaggcaccttcacagcctcccgaagggctgctgccctgatttgcatttcagacacatttgtgacagcctcataattgattaagagccccagcactgatatattaaaggttaatggtgcatcctgcttttgtcttgatttgtggcagcaaatatttgcgggtgttgagagctgagagctagccatgttcttggcatgcaggtcctgctggctggcaggactcccatggaatggcaggcacacaggagccaggggagcagaaaacggctgtatcccaggagaattctcccaattggtggatgctgatttccactgcacccacaaagaacctggatcatgaagtttcagcaccctgaggatggagcccaaagaactagatctgattcccagactccttggcaatctgttcctgggcagcctggacccacgtagctttgtgctgtgcctcctggctcagggccacagttctttggttcaagcacctcaaactattactaggcctgcttctctgcagatgattgactcacagttgtcctgaagggagactagtcaacccaagatgaagacttttccaacagaatatcaaatctagatatttttaaaggccaactcattcatatatgattcatacatataacctatgttcattagagtgtctaccatgagctggtcactattgtaggtaggggtcatattatcacaatttggctagaacttatctggagtactgaaagtcctgcatccaggaaatctctagttcccaagcaaactggggtgattggtcactcaagttgtaggcactggtgatacagcaaaaaaacaaacagccaagtcctattctgggaggggaactaacattaagcagccatatatgtcaagttgtgatttttttttgtatttttatcatataatgtaaggggtgctgtgttttgtaaaagattgtcagcaaaggcgtcctggagaaggtaacatttgattcgacctagacactgaaagagtgagccaattacaaatctgagggaagagtaaaccaggataaggttaagaaacaaccacagaaaccccaaggtgggagggcagggaggctggtacggcgagagcagatgtattggggtccagataacataggacctttcaggccatgtgaggactttggatgcacactttgactttggagtcaagaagtcattggagggctttgaatgatgaggtgacatgatctggcacagatttttaaaggatcactctgcttggccttcctagggaatagctgtaggggttaaaggtggaagcaaggagattcttagagagactatctcaatgtccagataagatgcagagtgaaggtcatgataagtgatctgattctagatgtatcttgatagaagagataggaaatgctgaaatttgtatgtgcgatacataagaaagagaagggtcagtagtgatttcaaggctcttggctacagcatctcaaagaatagagcagtgtttgattgacatgggagaactagaggaagagcaggcatggtttaggggttagtgatttaagagctcaagtttgagcatgtttagtgtgaagatctattagccatccaaatgaagtggtcagacgggtgattgccaggagtggatgaggtaggtcagggctggtgtgtcccactacagtcatcaatgtatagatgcatctacagacaactgacatgatgagattgtggcaaaagtcctgcaacccagggatcagtggtctgacccctggaagattccaaaattcagagtctgagaacagaaagaagaattaggaaatggataaggaggtcctccaaggtgggaggaggactgagcaagagtgatttctggaagccaaatgaaggaagggcatctaggagagtgctacctgtcaaatgctactggttggagggatgtgaagactgagaattggccactgtatttgggagatcattaatgaccttgatgaaagttgtttcagatcagcagagggatgaaaactggagtaagccaggttcctgagaaacgggaagagggtaatggaggcagtaatcatagataactctccggaagaagagctggaagggtggttggaggaggatgtcatctcataggactttttttttttttgagagagagaagatgtatgtatgtattttcaagccaatggaaatgatctgcagagagaaataatttcatggtgaggaaggtagaggtgacaactggaagagcaatgtactttgagaaggcaagaatgtctgggatctaggagacaaacagagttagacatgcataggagtaaaaacaaagctgtcattttaaaaggatggaaggcaactattcactagttttcgagaagggagttctctagaaaagcaaagttctccactgatggcttctcccttcttaggaaaaaagaagcagcctcattgtctgagagtcatctgagagcgtgggaggaggaagtgcacagggagatttagaagatctcaagcagctttaagggtctcctggaggctagtggtcatgattctaaagttagaatcaccatgctggtgtttagcttggatcttctcccagccatattcagccattcagttctaaacacaaaattgttttgaaacagagttcattcttccagaaaacatgaactcagctcctaatgtctgtcagactgtatgtggggtgatagaaattcagagatggacacagagtccattccctgggggagctcaaggttgaggtgggcagacagcacaggaagcttaaaagggaaaacattaggataggaccaagcccagaacacacagggacttggatccagtgggcatggatccactctttcaatacgacatgacagctgagctgattccttcagggtgggtaggttttagtcagggcacagcagagaaggcaggcaatgaacctgagtgaagacttggaggcctgagtgtgcaagaggtcttccaggctggcacaccaaaagcagggtagccaagaagagctggaggaggcagcactgaagcactgaaggctctacactaagcctcctttgctgggggaaatagaagccccagaactaacctagtgaatagtgtggacattgagctcctgacttggcttagcacctggcccacagttatttgacctcatcaggatgattttcacagctcctattactgagctctacttacatacaggatctaggctgagtttggcaaatcagaaacacatataacatatgcctatgtttaggaattcacagtctgatttgggaccagggcaccaggcctgggttgaatccaggcagaaggtgcggaagtgaggaaactccagcctgccttggtgtgggagcctcagtactgatgggccctgagtgcctgggatggcctcggaccactttgaattagtctcacatgtttgtcttgctgtagggactgaagatacaactatcacagcctcctcatggctggtggacagggtgtttgatagggctggtagagagacctcctgcctctcaatggatcttggctgatgggaggctaacccaggaggaagggtggacatagaggatagaagagagcacagagctcagttcccaaggcccagaactgatgcttgggcagcagcaggatatttaaaatcgttcagatcacattttttatttataacgtaataaaaatgcaaattttacaaaaatgtgtttgtaagaagtggaagtcttgcaggcattcactgcttatcccttttacttttgtttttatatttatttacatttattaattgttactttttacaagtatgtaaatatatacaaatgctttgagtttttagcagtttattttgggtgtcttttaatttcaatagcaattgaagaagtgggatttggagagaaaacgccatggagggaaggaaggtgaggagggaggacacctcagctggccctccgaggctggctttcaggcataggtttgaagaagggctctgtgacctatggaagcgtgcattttcctgctgtgggctctgcaaccctcaccctgtgggtcactaagtgtcctcatacagtgtttggatctgcagtccctctgctcactactcagaatcacaccgactaggctttggatacaaaggagaactgttttcttagtcttttttttcttgcttataacagaataccttaaactgggtagtttattttttttaaaaagggcatttatttcttacagttctggaggctgagaagtccaaggtctagcagctgcatttggtgtgcaccttctcccttcagtgtcatgtggtggtgcagcgcatcacacggacgggggcccaagcctactcgcatcccagctaaagcctctcttcttctccttataaaaataccatctcccctcccatgatgactgattagtccatgattgggttaatccattcatcaagacagagtcttcatgatccaatcaccttttaaaggtcccacctctcaatactgccacattgggtattaagtttcaatatgagttttggcggagacagtattctaaccacagctcctgtgtacaccccagcatcccctttcccaggcttcctggaaggtccccaggtaaatgttgcaaggtaggagaggctcataagctggctccttggccaccctgtctcagctccttggcaggacagccccagcaggcctcagccccatcctctgcgagttcattcctctctgctcctcttagtccagtgcgaggacatactagagaaacacatgccctagatgtcaactccaatggctcaaaatccaccctggctactttatgtaatcaatgcctccatcattttggctcacccttgctctgctttattaatcttcatagcatttttcatcacttgttacatagcagcaggggtcagctgacgatgccccacaggccttcagagggcctgcagcctgctttgtcacagcctgcaagtcaagactgcttttcctttttaaaaacattttaaagcgttggaaaacaaaacaaaaacaaaagcaaagaatatgtgactgagtcttgtgtggccctcagagaccacataggcactatctgtccctttccagaaagtttgctgaccctggcattacctagttattgtattgttgctgttgtcattgatgtttgtttctttgtctcatctcaactatgtaaaatccacaaaagtaggaactttgtgccattcttgccctatccccagacatagagcactgtctaatgcagacagatgcacaggaaatagggttttttgaatgacgagtgaatgaaagaaggaagacacctaggaagccttcccctgcatgggtgacagattagagaggctggggggcgctggggaagaaacccaggagaggcttatcagtgtgcagcagggtgggtcatggtgccctctggaagccagttgtggagccctatccaggcactccagattgctttgatgattgcagcatcatctcttgtagagccaaacatgagatagaaaatcaagactgctggaatgatagtaaaggcatctgtaggctgtagctatgaaagtttcaagtcaccaggatggatatccccaccctcccgtgtcttttgagccactccaccacattctcttctccttaaggaagaataataggacttccagatccacatgtatcaggcccatgcttatgacatccccaccgttgttgaaatccgttttacgtatactgaatattgattctgctcttgttacaagtgtttatctccattgccaatgtaaatatttttgtaacatgcaaagatgtatttataaattctgtattattgatttttctcatactgcaaacacatttatctctttgttaatgaacatatatctaggaaatagtaagattgatttacggagaaaggtgtggggaggacaggaggtggtaccaagctggggagaatatcctcggccacagctgaaggatgcatggtgggtcttccctagaggtgcatgtttaattagaggacagtgttctcagaggcaagggatgcttacaaagtccttttgcaagacaatctgatgtgctcaaaggtatcagctatgctttcagcatgtggaaatttcaaaaatcggtaatccaggtcaggagatacagagaaacagcttgcattggtcccaaatccacttttggtaggacacacttgagtagaagatattggtttaaacgtaagattggaggagagggtaggctttgtcaggggaggattccaacacaaaatattatcaaaagttgaagtaagaagataggcagcaaacagaagtgaggctcaagtgatacacatgcttgcaccatgacatttcatgagccagtgcagactctggcaggcagcctggggctgatgcttttgaggccgttcttcctgagcagttccttgcctaggagttcattactttcccagggtagcctctgctaggctgttactatgacgacccacaaagcaaaagtccagattgcctgccagaggagttttggtgtctctatgctcatcctgggttcagacttctgcaagtcatccttttaggtatcctgagtgcctaaagtgtgttgttgacaaggcagtagactgggggctgatgggggagcatttgcatgtaccttggcagcaagatggaaacaagatgggccataggcttctcactggggagacagatgggcagttgaggagataggctccaatcacatgagcctggaagcttagacatgcggcttgcccatgcttgcttccatctgggtgtgactactctggcctgttacccatgactccttcacatgagcacagtgttccaaccatttgaactactgataagcagtctactagaagggctagcatttattaaacattaactgtgtaccaggtatatgtctgtgatcattaatcttcaacaaccctgtgagttgggtatgagttatgaaatctaaggcttcagagattatagaacttgccccagtccatggttctggagcttgcatgcatcagaatcacctggagggttgtggaaacatagactgctgagcaccaccttcagagtttctgactcagtatgtctggagtggggcccaaggatttgcatttctcataaggccccaggtgctactgacactgcagctctgaggatcacactttgagagctactggtctatgtcaaacagtgaaggcattcaaagcagcatccacacccaggactgtcaaattccatcacctacatatttttggctgatgtgaattgctccctggtatgtgtccagaataagccatgtgttttcattacccaaatgccttctcaggtaatatcttctcttccaggaacattctaccccttggttctccatctcgctgcctctactcaccctttctgactcagcttaatgttccctcttctaggaagcatttctttagctcctacccatgggttagctacttctctgtgcttctgggatcccccatacagacctgtattttaatatatctcatattgtttggtcactgttgctttacttctctgatcactcgccccttgatgatgcctgccatgtattccttgcttggtgtgcactgtgccttacctagtagacattcaggaactgttggtgaaataactggttgaatgacatcagcaagttgcatcgtgcatgtgaggttaatagagaccacacctgtgataggcacgtctccttcatctctctgtggtgggggtacctggacactttgtagcagttgttgctgaagagactgacttcagaaaagttctaaattgagtgtgctgataacacagcctcctcctggtgaagcctccctcacttgctagaatgggcgtcctatctgacttcaacatctgtcttccactgactaccactgttggcttggcagtctggatgcctggctgtccccattctcctttattcctccctgtgtgtcccctccaaaactgggtgctgtgacaagaggatgacttcctcagggagatgatggctttggtggatgaatagttgggcccttgtgttcaacaccccagatagccttccataagtttattcaccctggaataagatggtagtgccccctgtgctgggcattagtgagcctggaaacctttgttgaaagatcgagtgcatgtctgagatgggagagattcctctgcacaaatttgtggctattagaggtgatggatggatgaaagctgtggccgtgggtctgagcagtaagattcaaagaagatgggggtggcattttggggtgggaacagtgaggtctactaaaacagaaatgaacatgaagccataaacatttgggctgcctgcttgttaaccagagacgttccctgagcctctggccgtgggcgccttaatgaataataccaagtggagagagaaaatctccatttcaaatgtggggatgaaacagtgtttggagatccctggcagttacccattcattccacactcatgaaaactgcagcaatttagagcagctcagtatttagactcaactgtataatttatcctgatgtttctcattcatcaaagcctcgtgtttgtttgtattaccatgagaaaaaattttaaaaatgtggaaaaaaaaaaagatccccctcctttcattacaggcaaattacggcagagttacaacccttggggcccttcaggcaaaggaacatcttgcttcaattagatataaataatgaacaataattagaaagatttcttcatcgaatttgttattttatgtttcctttcatctgtaatgtattgaaacgaatactgagctctgtttctgggccacatagcagggacctaaggagtgctgtggcatgtgtctccgaagcaaggggaggcatccacagctgggccttctgtgtgctggccggggaggctgctgtcagcgttggtccagggcagtggatgcaaaaatggggctccttcagctccattcctccaaattcttatagtctactggggacccagaataatcactactggttaccatcaggaactgctctgagagctgaacacaaatcccatttaatcctcatagcaatcctctgctacaggctctgcttctatctccattattaaaatatttggaaactgaggcacggataagttaactaacttttctggaccacagtgttggttgtgggggacagacaggcaaggtaggcaattggactccagagcccttgcttgtctctgctctggcacatggccctctgaagtcccggtgagctcatgctgccatagaagcccacaaggtgtggagagggcacagggaggctggggtgcggatggctccccaaggaaagaggcagctgttggctgttggattttcaacgggcttgtagaggtgttgttagaggagggagataaagggattccaggcagagggagcactgtggcctggtgccatggatggggagtgtgtgggatttctcatttcaaggttggctatggttctgtgtgcaggtggggagaacagccagagatgagaccggaagatggagggttgtgtagatccagttgagaagactggctcttcctgtggaaatggtgactcagagagagggagggatgatgatgtgggttgttaaagaggagagactgagatttctagaagagaaataagtaaagagtgatcaagttggaacctggagagagaggctggctccccactgggctttttttattttgcaattctgtttggtacatgacgttctgtcaacacgctgagccaagtacgctcttctgaggcaagtaaaatcttcatagcgactggtccttcctgctgtgactatttgtccttccccagaggagtctcctcctctgcccctagctcagaagtctgctcttgggctgctgatggccgttccttgtgaaatcccccctcaaatgtgcacctggctggagccacctgccactcctctaaggagagcaaacccaaggccctcagaagtgctttgtttttttcatcatcttttaaataattatcaacattttaaaatcaggagagatataaaaatccaatttttttattttttcaaagaccaaattggttgaggaggtcatggggaggggagcattcgaagtcaatacttggctagaccccagcacagctgcaagctttggaggggatgcctcttaatttaccctgagtcagttggtctctgagtgcgtttcttcctcatgctgtctctgagtgtcacaggccagccatcattatcgttcatcttgccaacataggcctctttcctgcccagcctctgcaggcgtctgagttggagatccgcagcatacagcctcccatgttgccctgactctttgatactatgattctctgtctatatgtttgcttctatagctggactataaactccttgaaggcaggaatcatgtcttactcatccttttatccctccagttcagtaaagaacctggttttaggtgcccagtcatcttattgaattaatctgcactgagaaaacacacctgtaattgaatgaggcgctgcaagtcccactctgggctgaaggacttgaactttgggggatggggaatgaagaatgtggatagtgggccatgccgggcttggagttcagaagggccttgcagcccatttgtatccttgcagtgtgcaatgcacagcatgtactcatgcctcgctgcctttctgcatttcaggactttccaggacctgtccaaacaagtggaaatgtcttatggcactgtccgggattctgctgtatatgagtacttccgagccaagggcaccaaccccctggagcaggacagcacgtttgctgaactctggcggaccatcagcaagaacggaggggctgacaactgcgtgtccagtccttcagaaggcatcaggaaggtaggcaggagctggcgcttgggcacgtgcactgtaacagggccacggggtggtcagcccccaggtgggagacacctccaggggcatctgcctctgagcagccctgttacctgcaaggcgatccatcgcacacgttctttaggtggatgccctttcagaagcagctgctctgcttcttatggaccttccaactttgtagagtggtgctggctggggaggagcaggcagattaagcctgacttttggcccaccctcctcatgggctcataggagggtgacacagagaggcctgtccacccgaggtgagaacaattggcaaaagcagtagcagagtgccaagcgagagttgcaggagtgaagggagggtgttggggagagggtgggcccactgtggttagcttgggggtctggttgaggaagtctgcatacggggaaagggggtaagggtcagccaggtggcctggactcatctctggggccgtactgtgagaagagttgtacctcagagatggggataagggcagagagccttaccgggcaaagccttaggaggccagatgggaagataccagtgccagagggaggaagggaggagaaaggccatgatgctcttcagcactgttagatgttgctcatttgtttcagtcaatttcccacaatgactcgaattcagcattatcctcttatacagctgaggatcgggtggctctgactcatgactccttgggttacaagctggggaactggcatttatccaacacgtgcagctgtagagcccttggaggtcaatgaagaagaatgtggtgggatgaaggcaggtgttatgattttgctgctggtggtggggtcctcctgtccagtgaaccccacatgcaatggctactgtcctgaggtcattagagaatggggcgagagacatgtacagccccctggccaggaccgctgcctctctgagcagactggctgcctcagtgtctcctcccatcctttccctcccagacccatcctgccacctctgtggagtctcctcatgcataccctcacaggcacactaacaccttgccacacacacacacacacacacacacactcatccctgtgctgcccccccagccactccagtgacttcttggccttcctgcagagagcagtggatgtcaggacagcctggggcaagctctggggccagtaaagcccaccgccctgcccttcatggtcctcagcaatctgccagcccctccctgatgtgccccagaggggtcaagggagagaggcctgagtccccctttgctttggaaacacatgggcatcaggcagagtgcagcctctatcccatgacaggctggggcacctagctgtggtgccatgtagagtgaggcccactgggaagatggtcgtgcacaggatgacttgtacaggatcccatgctcaggatgatttttcattgccatttagccacattgaacagcagaagatgtctaggctctggagcttgacatatttaggtgtgaattccagtttcgtaagttaccaacattgtgaaatggagcacaccattctccttgtttgggaactcttggatttgagaaagacctgggcaactttccatttggtggtctccttagagacttaaatgatctgaaaatacatatcatgataaattttgaatgtttagatttaacaaagtgatactttgacaataacaatagaatgcagtgtaactgtgctattctcatgcttacaagatttattaaaacctcgtagttctcactgcactgcaaaggatgatgctctagccttaagctgcaggatcttctttcacccctgacagtgaatctttgtggctgtaggtgacctcatttgaagataatgaacacaatgttgatttaaggccttttgtgcatgtgaggcctgggccaaatggccttcgcgttccctttcctggctttctttgactctcagagagagccaatactgtcatccacacagggtcttaagaagattcattgcataatgctaaaaaaaaaagcactgcttagaaaaaaaaaagatagctacttttgactttgttaaagttctattcattacaagccactttaaataaaatagaaaggtaggtcacacactgggaggggatgtttacaatacatataaccaatgcaagattactgtcaagaatatattaataagaaaagctcaaacaacttaatagaaaactggcaagaggcttgcacaggccttccacagaagaggcaacacaaatggccagtaatcaaatgaagagatgttcaaaattattagtgatctgtgaaatacaaatcaggaccataaagattatatcattttacaccaattagtttggcacaaaatgagaggcggtgaagaagacgtggagtaacagttggttaattgctgatgggggtgtgctcagtacaatcactttggagaagagcttagcattctcttataaaatgggacacttacatactgtatggcccagcaattacactccaatgtatccacccaaaataaatgtccacatgcacttttggagacaagaaaggccatagtagcacttcctgtagaaccaaaaccctggaaaccatccaaatgaccattaacaatataaagaaagatgttgtctacaatgaaatggatgaatcttagcagaataatattgagtaaaataaaacattaaggcaatttcatacgggtcaactaatagaaggtaacacagaatattataccctcttaaaaatgtataaaatatacacatacacatccaaagcaatgataaaatacaagattcaccacagtggttgctacaggtgggagagccagagcagcagagaagagagaaggacattgttggtaagtcagagttggtgttaggtttagattagcaggagattttagaaaattagttaatgagttaattcaaaaagtgagccattcctggagaaatgtatgggtatcctgaagcaaaggttgtcattaatctcattctgctcacctccctactcttccaaatgcgtaagtccagaccaagcaaggcagtgctgggctcctcacaagtacccaccccttccctctttgcaggcgacatgtgcctgcttatgcctcagaaaggccaacacacaccactgagccctctggttggtgataaacctggagatgagtcattagagaaacacctcatcattgttctagctaccccttgtccattggcggcacttaggaaaccactcaccgtctggtgatatttagtcttactcatgaatacaacaatgttaaaaaatcagtagcaaacgatgcaaacaaaggatttcttatcaatgcctatcacttcatggtatagaatttaatctttgttagtacataagatggattagttttatgataccttcattttatgaaccccaagctggctttgggatcacaaatctctctcttgcatttggatctctaagaaaaaaaaaactgactgccagcactagacaaatgttaagggttttataactagtgtcataaaagtgagtttatagtattgtcagacaatgaagtgtgctgcattttttttagtggaagaaaagctcagatttactctcaaatcctccttcttcgtgtgcctgtttggatgactactggacttaaatgcttgtctgaaatctgtcttcttccctactcctatggagcggcccctctgctccctgcccccagactatggcttcagtaaccttgtgaatccctgagcccagagagcagaccagtctggagatggctgtgccctaagtgaggatgacgacttgaatccagaaactacagaacaaatccagcaagtagggtattatgggcctagtattcagggaggaacagcctctccaaatcccaaacagagtctgctgccatgcagtgtaggcagcctggcaaaggtgaggagaagcccaccgaggggcttctcctggaaacttctttagcaattgacagataatcacacttctgattttcagttgctccttgatgactcagctccattttcagggagtgtttggtagtggagcaatgtctaattgctgcaaaagtcaaggaggttggtatggatggtatgctgttattttctccttgggagtcctaaggcttttaatgacatgaaaccaatttaggtggggaattgtttagagtgatcacttgtccacggtatcagaactggagaagggttatgtcatggttggctcgcctctgagatccactccttcatgccaatacacatcattgagcctctggagggtaataaacctggagatgagtcattagagaaacacttccttatttttctagctactccttgtccattggtggcacttaggaaatcactaaccctctggaaatagagtcttactcatgaatacaataatgttaaaaaatcagtagcaaaagatgcaaataaaggatttaccatgccagtggccactaagataaggacaagtgagaccttgtcaggctttgatgaggcaaagatgaaagaatttggaacaggagggaatttttatttattaagagacgacaacacaccattttcacaacaaacctgcctggcacccagtaagtctcaataaatacaggattgttcctgaatgagtcatctgtttgctgtctgactgagcagaggcagataaatcggagacaagattcctgtcatcagttagcaggttaccccctttagatttcatggtggaagggacaagagaaatagctccagggttcctgtcaggcttgtctcttgataaccttctgtaagggagaagattttcctggtcctgaaagatgtgtcacaaagagagaggagagaggctgcttccgtttctctcagccacatgcacttatcaggcctaaggaaagactagaccaaggattggcaaactctgactcctggtcaaatctgacctacagcttgtttttataaaggtttattggacaacagcccaactcatttatttacatgctgtttatggctgctttcctgctatttcagcagagttgagtagttgtgataaagatatgtggcccacaaagcctaaaatatctattatctggccctttatagaaaaagtttgaggactcctggtctggacaggggcaacccagggacattgcctgtagctgtgcatcatctcatagcacacaggcaccattagtagggagcatatcctctaactctatataatcaaatagtgcacaggcatctctgctaagaagctcctgctgcagctctgcaccatttaacagctcataggtgcctctagtagtgcatcatccagctctgcaccgttgaatagcatccgggctctgcccctttttgtcctctaggtctgtctctggtggcctggaaacttctccctcactgcgctgagacccagctttactgctggtctggcctggcctccctctgaaatctattgagcaatctctacatcccaggcactgggccagatcatttacatgcattcatactttcatctgaaaccgactacttgattattatctccaagatgtagaaactggacctgagcctcagagaaactaagtgacttggctaaggttcacacagatgtgagtaattagtggcatggtcaccaaaacctcattccactcgtgcctcttcccatggggtggtaatctcgtcttttctacacctcaatgtgtttccacccccttgtgtacattttgcttgtgcctctatttccttccctctctgacaccaaagtggcaagatatatgcctgacttccatgtttagcagccatactgctccttccatgtgtcatagcaaaggttattgaagtctgtgactttatcttttgattttcaaactattaaaatatccattacagaaacttggagatgcagaattggcctggcaaatggttcaaatttatatgataataacttcatcacatgaagtcagactttaatattgctgatgggattttttttctttagcttgatcaacttcatcaagcaacatccagcataacccaatttctgcccagtgccagggctgacctggatcaccagttgattaagcctttccataaatcagacctaatatttaataacactgtcaagtagaatatagcgttaatagtttaaatgtcaatcttcacagcttattcagtcctttgaataaatagatgagtagcttgtttcagaccctgtggctggagatagtatttttcagagggaagtatctttttaggccagcatttggtggtaacaaaaggtggtgtttttctgtcagtaaatatagctgaagtcataaagtgtgaatgcaaatgcaggaagaaaatgggcccgcaaatcttatttccactcctggtctaatgcttgctcttgcactagattgcatgtgggcatcacctcttagcaccaacatttattcgctttctcttcctttctgctctgtaacagggttgctctcattgcacacaatctctgcttagtgtcagggactacacctgtggcagagaagctgatccctagaaggatggcagtcttccacagtaggatcaggaactttggcacccagataacccttcatttggaaagggcaaggtgaggaagttggcctcatatgtggcagctcctggttccatggcatgctggaaattcctactgagaagtagggcgaggcttatatgggtgggcacttctgtgcacttttgggatgctagattcaaagatcaagagagtttgaccaagatatggaaggggatgtagactagatagccctgtgtagtgcaaagcaaaaatactgctctctataacagcaagagcccttgtagccatgatccaagaaattctgttctttctctgcttccacgtgagtatggattggggattttgtaagcctccttccctctcagccactcacattggataatcattcatctctatatcttttgtacctgctcaaaagaccctatatctattttgcaacttggatgctatcttctctttattcattcatttatgaacttactcatccattcaagaaatgtagtttgagtagcatcttccttttaggagttagaaaatgtgtgtttaaatgttatgctccatctagtctgtggctttgaacaagtgttcacctttctgtaccatctgtgatacttgcggaaggtctgtccagattagttgcaagtataccaatgtatagggtctaaagcatccagtgtcgattgtagcacaaggtatatgttcagcaggcatcagcaaactatcttagcatctactatatgttagaaaaagattttatttatttatttatttctgaaatggagttttgctcttgttgctcaggctggagtgcaatggtgatctcagctcaccgcaacctccgcctcccaggttcaagcgattctcctgcctcagcctcccaagtagcggggattacaggcatgtgccaccatgcccagctaattttgtatttttagtagagatggagtttctccatgttggccaggctggtctcaaactcccgacctcaggtgatctgcctgcctcggcctcccaaagtgctgggattacaggcgtgagccaccgtgaaaaagattttttaaaaaggcaacagcctttagtcttttatgaagtgtaattgaaatacacatatagtgtctatttcatgagtttagacaatttatgcaattctgtaataatcacccaaaacaagatacctatttccattacctgcaaaacttttcttttgtcactttttacacttctcctcatctgcagagacaaccgcttgcagatttctagcaccacacattaaatttacctgctcttgtagttaatataaatggaatcatacagaatatatgtatttgtgtttcattctttcacccaacaaaatgtatatgagatttactcatggagttgtgcatatcagtacttctttttttgtgtgtgtgggaatgatattctattgtatgaataaaccttgatttgtttatttattctccaattaacatatattgtagttgttgccaattcagggctaccataaatatgacaatatgaacaatattatacaagtactttgttgaaatatgtctccatttttctttgctaaatttgaaagggtgaaattcctgggtcattatgaaactgtctaactacctcctatgtggttatgctactttgcatcacctctggtaatatactccttatatacttgtaagtctcagttgctgaatgtcctatcctgcattagtgttgccagtatttttggttgcagccaatttagtgggtatgaacagaaatctgattattattttaatttgcttctctttggggactagtgatgctgagcattttttcatgtgcttattggccatccatgtatcttctttcataaaatgtgtgcttaagtcttttgttaatatttattgagttttccatcttctcattgctgatttatattcattaatttatgtattctggatagaagtccttgatcaaatataagtactataaatataattcttagtctgtaacttgcctattcattttattctattgacctatcaccattattaaaataatttgtatttaatcaattgactacatgccttgattgacagtcaactggccatgtatgtgttggtctatttctggactctctattctgttccattgatccatataactattcttatgccaataaaaaaatcttgattattgaagttttaaaataattccttaagtcaggtattgtaagtccttcaacttcgttcttcttttacaagattgggcaatttcagattctttacatttccacttgaattttagaatcattttgtcaatttcttcaaaaatgcctgttgagattttgatcgttattacatttaatataaggatcatttcagggaaaacttatatttttataatactgaatcttccaatctatgagcatggtttttctgttcaaaaataccaacttttgtcttcactgattttcactgttgtttttatattttattgatttcaacttttttgtgcataaaatattttcttctattttactttggttataattttatcttacctcttctagcttcttaatgttaaaacttatatcattaattttacacttgttttctttcctaatataagtattagagctataaacttccctctaaacactgttttaaccccaccctgtgaatttttatatgttgtgtattcattatcacctagttcaaaatatgaagtcccagacttaatctttttgtcaaggaattaagttctagaggacagcaaatggctgcaattgatttaatgtgggaaagaatatggatgcccagagcggggatacattctgcttagtgaagttagaagaagctatccaagatagtcatgttaggaacacatattttataatctataagcctcaactccttttctgatttgaagataaaagtgtgagaatgtgagagcaaaatggcaagcaagaaataaaaggtacaggaagataaaggaaattagagaggcaggaaaaagcagttgaactccatgtgaacaaaacccacatttatttctactaaatgtgtagctttagcagtagtttatttctactaaatgtgtagcttccttgtaggagaatgagggcagtggtcttttcactgcttcacagttgctgtcttcaatatgcctcccatggtcttgggcttcagcctcctgagttctataggccttgaccaattaaaatgtgcctaaacctttttcacatgctttgactctgcagtccacccaacggcagatccactcaaatctcccccagtccatatcaacttttaaaataataagcagttttgagaggaaatctttaggttatacatttatgatttacatgcaataagttcccattaagaaaagtttaaaatatttcttttttcaccacctaaatgcagttccaagaatcctcttgtatatttctgtctagtctttttagaatttctacaaacgttttatataattataatgctataaaaatatttcatcctgcatttttctgacaatgtggtaaaactttataaaaaagatttttctgacaatgtggtaaaactttataaaaattagtgactagtattttatcaaatagatgtaaattgatgtaaaaattttatttaaacattcccttcttgattgccatttgggtcatttccagttatttacagttataaataacattgtaatgaacatctttatgcctaatgtttttcagttactacatttatttctgtaggtctaattctcaaaagtagaattatggtgccaaaaaggatataaacatttaaagcccttgatgaagtattactgaatatcaccaaaagcagggctttgaatgaattacattattagttttgggatcaaaagaatatttatttgtcagtggattttttttcatcaactccttgtgatttatcttaagatttaaaaaataaattagtatttttctactttctcatatctttcattgtgattttttgttcctttttctgtttatatttgtacataggtatttgtgtatgcatgtatttttgctttattttgctttataattctggggactacagtggaacagcaatcattttcttttcaatctttttttcctgagcgttgccattataaactgtggctaattggggaaattgaataagatcatgaatgtttagcggtctgtggttgttcaataatcagaagtgatggacatgtaaatttcttccttaaatatagatttctgcagtgatttactctgtgaagtattttgtcttttatccatttattcattcatttattcatcaactcatttactagtgctgaactcagttaatatgtaaaagtggacatgacacttttcctcctaaaactgagttagaagagaagacaaaaaccgacttgggacagtatattatttcaaaagtaaaagatttttgtatcctttcttattttacccggggtcttcctttcctccactggggccttatgtcaatgtttggacaatcaggagattaatttaatcacaacagctaccatgagagaaacctggcatggatcaggtgtgaggttaagtttctcctatgcatcaagtctattgtgcttcagcacaaccagttcattaatgaggaaactgaagttccaagagggcaagggacttgctgacaatcaagcttgagtcagtattgaactcttctcactccagcgcccttgtcgttaccccgtgacagtctgcagaaatggaaggaactcgtgatcagaatgaaacttcagctcccccacactgcttggagcaccagtctctttctctgcctgccaggctggttcctggttatccctcaggccataacagaagcattaacgtctcctgagccttccctgggctttccctttccccttaccacacagtgcatcccagagtgcagcctcaccagatgccatccaaccctcagtgccctgctctgtcacagccctgctagacttggggcttctctagagtgaggcctgccttttatttatttgtcctcagggctggctgagggcagaggtaggcatggataaagcacttactcaatgtctcttaacctttcaaaaatcaaagtaaatgttcaatgagtaagaaatgagagtggatagaaatagcattcatatgcatctttcttaaacatgagtgagcagcaaaattgctggggtccacttgcagtaagggcaaggagggggcaggggagggcagggggtcctctgccctgggcctgggtggcagagtcagtcttactagagccagttgccatacaattgactgagttggcccctttataactccttgctgtttaattctgtttggtgatgattggtttgggataatacagtccaaatgtcaaggaaagcccccactgtgcctcccttattaaattattctgctttgggttttgagcattgccaagcaaatctcattatgaattcttcaattactttcttttacgatttttataatttgatagagtaagctctggaatcaaaccaatatccatgccaccatgctaaccttgattattttcaaacttcttattagaggaagtgggaggatgttgacttctcttaaatctgatttttttttttttttttttcagatttcctctgccctgtaatttgctttgtacccaggtctgatacgcttcaccttagtgctggctgtaaatgtgggctgattccattctgtttgttccattgaatattattgctttgggttttatgacttaagtttttacattttgaactgaattgttttgttatttgattacattaaaatcaagaagaaatttctgatgaaaataattttgatttatcatgtcagccagattgttggcaatttttgtttagcttatttttatttccactttattggcataatgtttattcaggagcaagagggaagagaaaatgaagaaaataacattcacaaagaaattaatatgtgtggcattgtgcttatgcactttatcttcaccattgaggaccttttgtggcgtgtttccattttgcaaataaggaatgcaaaactcaaaaaactaaattattttcctgaaaattagctgtctctttctaccatttttgtgtctttttgttattactactgttattatcattgtcatcattatcttgtcatcatcaataagataaaacatatttgagtagaagtagtggtttccaccgggatggggtgttccaataaacagctgataggtctcctcactctacaacatgaggatattaagatttgctctgggtcctatattttgaaattgtagtctgtgtgtgtgtgtgtgtgtgtgtgagagagagagagagagagagagagagagagagagagaggtgccccatcagggctgtgcaggaattcccccactacccctataaagcccctctactggtaaactttttttttttttttcagatggagtttcgctcttgttgcccaggctaccatgcaatgtgcaatcttggctcaccgccacctccgcctcctgggttcaagcaattctcctgcctcagcctcccaagtagctgggattataggcatgcaccaccacgcctggctaattttgtgtttttagtagagacagggtttctccatgttagtcaggctgatcttgaactcctgacctcaggtgatccgcccacctcagcctcccaaagtgctgggattacagatgtgagccacctcgcccagccctctaccagtaaacttttatggttcttttgactttacaaagctgtaaattccaacaggtagagcccacagcttgttcagctgtgaggagtgagagtctatttgtatctttttggtcagaatgtgacctcttttgtagctcctcaaagtgctccaaggctgttgtgtgagctctgacattttagcaaaggctataaaggaatacttagccacaaatggagttagaggatgaggctcttccacataagcccctggagacagtctcccagcacatgaagggatgttcgttaatattaattgggatagcatgcaattttgcttctctatcctcacagcacagttcgtgttgccagttcccagcaaccctttatggctaaagagactttaagaggaagctgcttcagacagcaaagccaccttggcctcagggtacagtttcatgggtctcaaactttgtttcagtaaagtcaaacgctccgttaaaggcaacatagcatagtgaatggagaatgtgatttgggtctgaaagaactggatttggctctcgtatccatcttttaccagctgtgagatcttgggaaaattaatgggctcctgaataataagaataataataccaagtcttatcagagttattgtaaagattagaagtgatgtgaaagagccagccatggtggctcacacctgtaatctcagcactttgggaggctgaggcgggaggatcacttgaggtcaggagttcaagaccagcctggacaacatggtgaaacctcatctctactaaaaatgcaaaaattaatacaccatggaatactctacagccataaaaaggaacaagattatgtccttttcagggacacggaggaagctggaagccattatcttcagcaaactaacacaggaacagaaaaccaaacactgcatgttctcactcataagtgggagctgaacaatgagaacacatggacacagggaagggaacaacacacactggggcctattgggggatggagggatggcatcagaataaatagttaatgcatgtgaggcttaatacctaggtaatgggttgataggtgtggcaaaccaccatggcacacgtttacctatgtaacaaacctgcacatcttgcacatgtatcccacaccttcaaataaaataatttttaaaaaataccaaaattagcccggtgtggtggcacatgtctgtagtcccagctactcgggaggctgaggcacgagaaccacttgttcctgggaggtggaggttgcagtgagcctgggcagcagagcaagactccatctcaaaacaacaaaaaaaccttaaaaagtatatgttaacagtgtagttctcaaagggtgggccttgttccaacaccgccagcatcatgtgggaacttgttagaaatgtaccttcttggactctactccagatctaagaattagaagctgggcaacagggaggttagcagtctgtgttttaaaatgccctccaggtgatccttatggcttctgaatttgagaacatttgcttgaacaaatggtgcttattgtcatgattgttgttttgttagtattttatttattcttgaattttagaaactgaggccaagggtgcccattgatgctgtctgtgaagcctctggaagagacttcagggtggaaaagggtggagggcagacctggaggggcaaacaggatgtgccccattcagcagctcagtcaagccaagaccaaggttcctggcttcccagattctacttgccatcctttcatcttttattcaatcactttacacatatttacttagcaccaactctatgccagacatcatgctaggggagcaaacaggacatgcatggtcaagcttacattcttgtgtgtgtgtgtgtgtgtgtgtgtgtgcgcatatgtgtttacatggcacacagggagtatctgcacagtcctcttcctgtgctttatgggctatttgaccacatgtatgcttgtcatctgtgtaacctgaattcatgtattcttaagttgtttcaatttcctgggatggcattcttcattctgtattcttttccctttgtaatctattttgtatccaggcacaccaatttgctctttcttttaggtcattcttaatttttcccatggaataactcagattagattattgtttatcatggtctttggacaatttaaaattttgacaaatcattgaaaatcaatgtgtccctttgccctactgacaaggttgtttatagtccctagttttgttgatagtgtacaattgcagattttgagaaaagaggcattgatttttccaacttaggacttttctttttcctttataccaaaccagcttctttttttcttgaaaatataagaaaccttattttactaggacaattttttgctcaataaacaaaactattcctccccaaagtgctggaggccccaaaagggaatgcagccataatgtctccacagggtcagatgctggaggcagatgtcattaacaaaagcttgacaagaatctggcagcagaagaggggaaaaaaccagcatgaggacaggatggtcagggggctcaatgtggctgtttggggctactgatattaaacttttgatgtgacagagaggaaggcaatttgcagtcaaggagatctgaggaggaactgaagctctgccaatagcaaattctgtggccttggttctttttgagcctcaatttccctgggtggaaaatgtacacaatttggactatggaagtttatcctgaactttctaagaaattcagggaacagaattgatggtaagggaagagaatagctggtaaagcataaagtagagttcttttcaggaagatattcagtgtgactttcctttaaaatttgtttttagtagccttggtctctcaactctatggtttcccttcttccattcagtactccaattcaacaccctagagctttaatactatctccctttataaacctgtgttcaagagaagatcagaaattatttgacccagaggtctaagtcattacatcttgactttagcatgcatcaggatcacctgtaaaggttattaaaacatagcattttggacctcgttccaagagtctcttatttggtgggtcttgggatgggacctgataatttacatttcttataagttcttcagtgagctgatgctgcttggccagaaaacacactttgagaatcactagtctatagcatagactttgagaataccagatctggagaagacttgaaggaccacctgtgcccctcttccatttttataaattgatatgaaatgaataattgggccaagactgtgacccagcctagtctaacagtttttctaatttactaggctgatggttgaggacaatttcacgtgctatttattccaaggcactcgcgttgttatcaggatccaaactttaagctgtaaggtaatgctggtaatgattgtcatgaccatgagaataacgtgttgttgtctgcgtttcttcaatgcaccaggcactttccacactgtcttttcctgtgacaagtgtgtgaggtgggcatgctattcctgtcttctaggtgagggcattcagctcagagggcttagatagctggccaaggatgctaaagaaagacttggtccacctgtctccaaacccttgttcttgccaacataccatgccgtgctgtctgtgaagtgggattgaagactctataaaggaagttaaaaaatcaaagggcagataacataagagaaaaggcatttctgctattgttgctgttgttgagttgtttgagtgtcttacaaattctggctatctgtccctccattaaaaagtgggcaaaggacatgagtagacatttttcaaacaaagacatacaaatggccaacaagcatatgaaaaaaatgcacaacatcactagtcatcagagaaatgctaattagaccgacagtgagatatcacttacaccagtcagaatggctattattaaaatgacaaaaaataacagatgttagtgaggatgcagagaaaagggaatgcttctacaatgctggtgggagtgtaaattactacaacttctatggaaaacagtatgtagatttcccaaaaaactaaacatagaactacccagcaatctcactactgggtatctattcaaagaaaattatatcaaaaagataactgtagttatatgtttatagcagctctattcacaatagcaaagatatgaaatcaatctgttgattggataaagaaaatgtgatatatatgtatatttatgcaaaggaatattattcagccattaacaaaaataaaataatgtcttttgcagtatcgtggatggaactggaggtcactctcttaagtgaaataattcagaaacagaaaatcaaataccacatgttctcacttttaagtgggagctaaataatgtgtacacctggacatcgagtgtggaataatagacattagagacttggaaaggtgggagggtgggatgggggtaagggatgagaaattacatgaagggtacaatataggctgtttgggtgatggttacaataaaatcccagacttcactactatgcaatacatccatgcaacaaaactgcacttgtaccctttaaattcgtacaaattttctaacaaagaaaaggaactcatggaaaaaaagggattggtggcctttttgagatgcaaaattactctcattctctctatccactgctgtcctcctcactattgactatgttactctaggacacaggaataccaggatgagacaggcaatcatttgcagaaatcctggggcctggccatcaggagccatgtcctactgttgtagcctgggaacacctccatcttctcggttgtcctgcccaggtcatgggccgcctctctgggactttcatgacaaagctaagggctgccctcatgtctgtgctctgcatgccacacaagccagaggccttcccactgctagatggccttgctcccctttggttgtgtcaactcattgtccactcccattctattcactctgggctgcagccaggagccaaattaactttgcaccctgtggaccctcaggaaagcagctttttcagtatttgtggagagttcagctgcaatctcttgtcccccgactgagcctgtcctggtttgcctccttttgctggtccagagtctgatctggataaaaagtctttacctttcattctttgggtagcaggtttcctgacaacctcctagctgggcccaccaatggtctgcctcacagcctcacatcattttgattctgcatcacctttctccattgttctctctttagagatgggctctttatctccagctgaaggtccactttttctgaacccttcatggttctccagcagcttggtacctgagtcctcttctctgctgcctccctgggggcaatggtgctcacgataatacacatactcatacactcacacataaacacactcatcaacctacacacatttatacaattctcacatacatatacacacaccttcacacacacacattccctcacacttacacatgtacacactcacataattctcacatcctcacatacattcacacacatacacagtcatacctgcacatatattattccaacatgcacacactcacacacccatacacacacacattcccatgcacacatacacataaatacatacctatagacactaacatgtattattgaatgcacacacactcacccacccatacattctcacgtgcatccacatggacacatctatacacacacatctccctcacacttacacatatgcacatacacaattctcatgcacacacacacacgctcacactcttctgcatgcacacactcatgcacacacactgcttactcacacagagtgtgttgctgacttggtgaaggtgggggagtgactggcaggaggggagtaggtggaggaaaaatgcttcaatcacagctgacagatggatctcctgaccatctgggaactgaaggaaggagcaggaaacggaactcgcgttgagccctcatgctgtaccaggtacagtgttttgccttcgggaatttcccactcccaaccttccttttaggaaacaattcttagcccctgagacagtagggtcactggagagctgggctgtgacaatgggcaccctgctttttctgctgcactgtgcagaaggaaggaggccgagcctcgatatccgtaatcacaaaaggtgaggcttgctgagctgcaggaaacataggcaacacagagatgttcaaaaccaacaaaagccacccatgatggcacctcccaaagatgaccatggcttgtatttggcacttatttttgattcttcacaaacataaagttttacataataatttaagaggcggtcacaatgtcaatactctagtgtaacaggttctttttccactaaacaatataagatagattattatttatttagcgtttaccatatgtcaagcaagatcctgagcacatcacacatattgaggaatttaatcctcatcaggactctgtgaagtagggaccagtttatccagtggaactgagactcagagatgttaaacaacttgtctgcacaggcagcaagcgtggagctagcatttaaactcatacagttggactcagtaacccaggctggttcatagctcaggggtgcctctttttttcccatggaaatttcccttaacaatcaatgctcttttaaagcaccatattaatggtaacataatgttccaccatctaatactatcattcacctatctgattcccaattattgagcatttaggttgcttccaacttctgactagtttaaacagtgtagccctgaaaaaatctctatgcaaacattttttgaaaattgaataattccttaggataaatcccacgggtagaatcgctgcatgtacacattttaaaaacattcaattctccccaccaaattgccattccagaaatatcacgccagccacactcccaccagccgattgcaaaattgtctttttctctgcagatggtctgggtttttactgttgaatcttacaatttggcatggtacatacataatacaggtaacactgtagccagggttcaggctgcatgtggtaatgtgttgccattgaatgaacgtgactataggaactaagacttgggatgcttgaaaaggctgaactctgcttcgttaggataaatggtggctgcaagcagaggcaaaatgcactctgcatggatggtgaatgtacatgagaatgtgtcaggtttccaaagagtccctgatgtacagagaaggggcagaccccatgtcctcccttcttccagagtttcagtgactccatgaaacacttttgtttctaaagctagggaaagacaggcattgccatttgtgtgtggtctgtcaccagcaatgtcccctaggaagtggtccaagagcaaagacagtaggtgaattttccccagtccatacttcataagtctaaccagggcagaggagacagcacagacttctttggagccagatgtaactcaggttgacatggctccactgttcataattcaggcttgtttgggacacgtcatttaattttttggagcctcagtctttttgtctgtaaatggggtggaatcttctgccctcgagaagtattatatggataaaaaagggatcaggtttctgaaggccttggtacccagtgggtgccccacacctaccctgcacctggcactacaggcacctgtcttccttctgtgcttcctttcagatagcatttctgactgatgtttgcagcaccagcattctcatttggggggagcagtgtggttgcttgtccctttccaaagcagttaggatggaatggaatagcgtaatgaggttcttgccttaaaggctgatgtctctgaaaggttgtgctccaagtgagttccaaaaggggtggaatcagtggagcaacaaaaggcaatgccatctcattttactgccagtgtgaagtcatggaacacaagcaagtcatccaatcagctcacttgtggcttcttttatagagcccaaccttcctccagcaaatagaggccaatcatattctgctaaatgttagggaggatgctgtaagtgttagagccagactccctcaccatgtcaatttttttccttttgcaacaacccagggagcaggtagactgagaagggaatctgcttgctaaggtgtttgctgggggacaaggctgggtggtctctctagctgctgttgtcctggcatcccagggatggatgctcacatgcctttgactttttctcatgccaagatattcttcctcctttcactaaagttcctgcatctattctttttttgtctggaccatgtttgtttgtttacttttcttttaggaaaagcggagaatgaaatgaagtaaaatgtttagaagtaggccaaaaatgtcaaggagattttcccaagtgcttgggtattatcagggagccagtgtcctggagaggtctgagagctctcccaggcctttgtgtcctgttgatgggccagggcactgctccagtggagccaggggcacacagggtatgcagattggattagttgtctgtgtcatgcatgatagaacaaactgtgaaacaaggttaaataaacacaacactttcacccacttgtttagaaaattatcacttatcccactctattaggtgatgatcaatcttttagaatattacatttcacatgtacacacaacagtaataataccgtatctatcaataataatctgttcatcctattatttctgccactttccttaagtattcatatatatgtctatatataaatatatagtgtttttgtaaagtctttatattactatctgttacataaaatgctatcacatttatgaatcataatttattgttatttccctaatagtaaatatttaaaccttatgtttactttagagtcaactcttaatttagaatatttgtcatgcattttagatatatttaggttactttttcggtgaaattcccaacttgcaaaggtgaaagacatgagcagctttaaacatttgtgttctgtattattgtattactctccaaaggattgcatcattttgtggtgccggtagccatgaaggattacgcacatttttttcacagtttctttaccactagatattatcaattttttaagaaaccgctagaaatgtaatttggccacttacacatattagttttcagacctctactttcttagatgatctgcaaatacgtttcatagctcctggaagaaacgtgggggctggagtcccaggactccgtatctagtcctgaagggctctgtggggtcaaaagggcctggagtgttgggtgtctatgcccacctaggctctgcagacagctcaaggcttggagtaagcttggctgtatccacagccttgtctccagcctaagtttccaccagccttatgctaaggcattgatccatggtaagtcagcgattggaaattcagaatgcatttcatattataaatggactagccaggccagataaaggtaatttaacccattgaaaggtgaaatacagtgtttgtttttgttttattttaatagcagaactcaaatcagtggcatcccttttatcttttaggcattatgagataaatgccaataatctatttgcaaacagctcaccacctatcatgcctgttctcagacattatcctcctcaactccccacagccacctgtaagtagggacaagacagtactgggagatacaggaagaaggagttggtttgaataggaagtggcaaaaaatagcagatctaaatatctgttgtgacacttggtcaagggactctgggacacctgcaaggagatggctgggttcatcctcctccctctacaagcaccagaccacagcacaaggttgaaaggaagctagattcctgctgatgctctgtcctttccagagcctgaaaaacatcctcaacagaaaagagttaatataaataggaaatgacaaatgcttcctaatgtgaaagatctctgaaatggaaatgaagggatggagcaaggcaagaaaggggtagacatgctttcctgatagaactagaggctagataagaggttgcacccacagaggaggggtctgaacctaggagtgggattggaggaaatgctgagactcaaggaaggaggagggtgaacttgcaacaggaggggcagggaagagaggagttgcttggctgtcctggaggcagatgcttgatatatttggtgtcctccccccagccccccgtagtggggaagccagacctgtggataagtagcacagaataagggggtgaattcatcattatttggggccacgtggaaaactgattctgaccctacaaggaggaagcaaagcttagagtttttgtggggcaggatggagctcattctgcaaggaaacaagaagagggtctgtataaagacaacagggccatgatgggtgggatattttaacttcttagagctggtgtctgcaatgttcctgacagtatggtcagacctaagaagccttatgtctcagacaggctctgtgacacactggaaactggggagatgtctgcaagtccagaaagttctggaaataaatgaatttggggacccaaagaaagcctcagcactgccttttactcagcatggagttgaaagagaaaggctgaggaagctctaggatgccaaggaagtgaagacgacatttaggaatggagggtatttcctaaggacagagctagaatctggcctgtcctgccactattggagcttctgatttggccctgtcagggtcctgtccataaagtgttcttccccatgcacagggagctctaggcatgtacttgtgctggatattgttaccagttcttggaggcactgaagtcaaggccatttcctgtgttcaccttaagcagggctcagtcaagttctaagtagaaatatcaaatgggtaagatttaccacagtccatcctcccctctttctcatctccacactgttatactcccctacatttccatagaattgcaatcccctggcattagattttctgccgtctccaaaggtgagcccctcgatctgagacataagcccatgccatgatgagaaagctcatcctagagcctacctccagctcccatcacaaaatgtgggatagcaccctctccaggtgctcctgctttggcattttcagacagattcaggatccagccacatgcttcctcaagcagacacaagaaatatattggcagcctggcatagtggcgtgaacctgtagtcccagcaactcaagatgctgaagaaggactattgcttgagcccaggagttcaagttcagcctgggcaacatagcaagactgtctatattttttttaaaaaaaagaaaaaataaatataatgatgaacttagtccctgtttacaaataggcaaatggggagatggagtgttcagtaggtccagaaggcagctcctactgtctcctccggacttccttcctggttagcagggatttgaggctgagccattgccagcatcccttctggatgttccctctttctcagcttaggccagcaggactataaatgtgggtgctttcatgcagctgtgctcacctgtccctgagcccaaactgagtcacaaatgcccaaatggcttgaaggaagccaagtgccccattagagtggccacatcaggctttccttggagtccctttccattctctctaagccagcatattttgttttcattcttggagcatcacttgaaatgtagaaacaaacctttatcttaatttttccctcaacgtgacatacccttttgaaatcatagaaataacaatgtctgattgtcatgttgaattgcaagcatggatgtgaaatgctccaaagtctgactaaagccaaatattaggtcataagtcaacattttgctgagaaacttggttactaagaggttgaaaatgtctatctttttgtgagaaaacttgtttgccagcaggaaaaatttataggattgttatcttcctacaaggaaggagagagatgtgtgtaattttgcaacctgggtcaaagtcctttaggacttctgaaattggattggctgaggactgaagccttggtgtaatatttggattgctcctcgaggtgaaagtcaatgagtggcacaggtgtgtgtcatttcttacaaggtcgttgggcaaaattgtctgaatgtctgggaacaggctcttcccactgcaggaggtcacactctgcccacaaatccttctaatggagaacttctgacaaggaaataagctgtcttgggccatgagcacttggggtcttgaaagaaataaaatcttgactaacttcatctaagtagctacgacactctttggaaagtctcagtggacatgaagactcaactgaacaaaggcaggagccagggacaatgtcctcaacaatgccaagaagcctgtagcttgctagcatgacctattattgtctgtgatgtttcagtgctgtcactaagcccataatgaggcccccatcatctggtgcaagccatggtaaaaaggaaagaagcggcaaaggggtgtctgtgtgctcactatagcattaaaggcaggcactttgctgcattaagaacattctactttgttttaagatggccaggtggcagtgtcaggtttgcatctccttccagaaagtaaagcagcttgcattccctccgagtgcccaaactccaggcaaagttagaattgttgttcaggatagaagagaacctctgctgtggatgagtgcgacagagtagggctttagctgtcgctgcaggcaagttcctgatggaagaatctgccaccactgcactgatgtggagatagtgacaccagaaacctgcacctgtgtgtgcatatatatgtttatgtgtgtgtacaaacatatatgcatgtgagtgtgtgcatgcatatgtgcacacatatttatgggtgcatatatgtgtgcttattacacatgtatgtgcgtgtgcacaggtgtgtttgtgtgcaggcatgtgtgtacaggcatgtgtgtacatgtgtaggggtgtgtgcaggcatgtgcataccttcatatgtgggcagtaaaagacaagtggcagaagcctggcgtggcaccataacagtcaagccctgtccctaatggatttttcctcatgcacagggggctctagacatgtgcttgtgcttgatattaagtcaccattactccgcagcactgaattcagggctattttccacattcaccctaagcagagctcagacaagttctaagtagaaatatcagtgggtaagatatgccacagttctattctcccctattcctcatccccaaatattattctccccaacatttctgatctcagaatctcagtcacctggcactagattttctgcactttccatggctgagccctctaatctgagacataggcccatagcactgtgaccaggaagctcgtcttagagcccacctctagctcctctgcccttcccctctccatgagatgttttgtggctggcctgcgcaccttttatgtctagtcaaagtgagtggcctcaaccaatgctggcatttgtaggccagaaaacagtagcagagttgctgtgctgtctggtgggtaggaagaccattgaggatgggtccctcaaatcccaccatcaagatggctcaccaatcaaagctgacacagctggccaggactgcctgacttcatggtaattttgatctttcaggcaaagaaggggaactacgccttcctgtgggatgtggccgtggtggaatacgcagccctgacggatgacgactgctcggtgactgtcatcggcaacagcatcagcagcaagggttacgggattgccctgcagcatggcagcccctacagggacctcttctcccagaggtaggcttgggcagcaaggtaactaccgctgcctcaggactctagtggtcaagggtaggagaataacctcttagaagataagagccaatgcaaacatctttgttcgtcatattttcccaagcacatactatgtcccactgcttcctcctcccctaccctcagaccctgtggaagtatatggtccctgccaggaaggctcagagtctctgtgggatctctgataggagcaggtaatgccagcctagggcatattagcacatggcaaggacgtcttcaggatgctagggtagaggcagggagaaaacggcatctcaccagacccaggatatctgggagaacttcccagaggaggggacacccctgaagctggaagaatgaggaggagttagccagaaaaatgaataattagcaggatctgataagggcctactaatcacttttaaagagaaatgtacctgtaatgtggcagtagtcaatgtggagactttaaaaaagtagagtcagagaagcagaatgtctccatatttatttgcacgtggctgtatggggcctctgattgtagggcagaactttcctggtccaaggagatgctgtctgctggggcagggaagggatgtggccttagccaggaagggtggaagtggggcatgggtagttcagtggcctttgtccagtagtcagcctgcaaacaggggctcctgtcgccaaggtgtctaagccttgggccatcttcttgcacatatctgtgaagggcattttgctgggtgaagggatgaatctgcagagcctagtgcagaagccctggggcaggctctgccagagtccacccaaatccaaaatgaggcagaagcatctgaatggaaaggctggcatcgtgccaggctcaggggcaacactcattgactgattaatgcatgaatttcagtactaaggaacttctatttggagacgtgagagtcctcataaaccatttctttaacatcctgcagttcagagggcaactaggatatctgggttgctgagccagctgctggcagagctgggagtagaatccaggtctcttgagccctagtgctatgcccatgtggctgctggatctccaagcaccacgacctcccttctctcacactctagatgtccagattgtgcccttctgctcatgagtacctggacctcagccccaccaagggaaggctgaggaggagggcctgcaaccagtccattcagtggcttctttgcaaaactaaggaaaagagtagggctaattaaggtaaatgaggcttttgggttttcccttaaatttaatcaagtatacattcttttcctccctctgctctctggagcagagagagatgacaagagggaaggaggagtagtgatttatcaattgctcagattaaatgcatgaagaaagaatggcttctctccaggatttataacacgttggtgttcttgaggttcgcaccagttggttttccgaaatgggaggctcaggatgattccacagaccatcaacctctgagcatctctctagaacagatggtaagagagcccatggggccaacacagcagcagcaccaagactgctcatgtaccccaaggcagcgctcatggaagcacaggggccccagcgaggaaaggttagagtccccgtgtgctcacactgctcagatggctcctgagagtctgctgaagtgaacactgacacactggagagaagaggcagcagacattagtccaggaacccgggtcttggctggactgctgaatggagtcagagcagagggggctcccattaggtcagagcagaacctgagaatactcaacctggagaaggtggagatgagtggggaggggtgtggctgcccacctccaatatcgtaagccttgctgggggcagaaggagtgagatgtcctttgtgtggcttcagaggaccagggccagggccaacatggggtgtgtgtttccagagaccaggctttctgaaacaggcctgcccactacctgtccactcactgaccgtgaggtccctgtgtgaaacctcccaacagagaccccatgggttgctctcctgactccaatagtcaccataatcaaatgtggctagtccagtttccatgtcattttggcaagtagtgattgattactatttgctttcatcagaaggcatgtgctctgtgattataaggaaatgtcaccagtggcctgtgctggcttcccacagtttcctcatcttcctgtagggtacagttcctcctgggctggaattatcccttgagtggggacactcagacctcaggttgccaacttactgatgccagtggttctttaaaaggttctgttgggctgggtgcagtggctcccagcactttgggaggctgaggcgggcagatcacgtgaggccaggagttcaagaccagccagaccaacatagcaaaaccctgtctctactaaaaatgcaaaaaattaggtggatgtggtggcacacatttgtaatcccagctacttgggaggctgaggcatgaaaattgcttgaacccaggaggtggagattgcagtgagctgagatcatgtcactgcactctagcctgtgtgacaaaacgtgaccctgttctcaaaaaaaataaaagggggggggggctttgttgtatggtgcatgcagaactgtgagctgcctctagcttcagaggaatgaagggataggtcctgagagcaatgcctgatgccatttgcagaaaacaggttctagtataaatgacaggtcccagccttatgtggaactgctataactgtcttccccttcatcctgggaactaaactatttccttcaataaagatatgctcctttgctttggcagaggacaggatgtagatgtatgtgtgtgtgtggtagggcttatgtgctataaacaggcttgcagaccacagcatgcagttggggcattcaataaatgtttagcaacttaatagccatttattgagcacctactgtgtagcaggctccacagctattgaatgaaaaaaagcacctgcaattatatctgtctggaaaatagaacaactggcttcaggaagtggctattatccctctggcttcctcgtaagcgagagtatggattattatggtgtgcattagtttagcctcattttcaaagtcattttgtacccgtgacttgttttagctttcctctgtcccttccatacttaaatttcctttgtttgtttaggttttttgttttatgttatgctttcgtataaattgccttactatcattctgggataagattgggtataaaaaatgcatacaattatagggagcaggaagaagagaaggtcagcaaaattaagcaacttgcctgacattgcacaggatctgcctaatgagcggaggagtggggatctgaccccacaaccaccatctggccagagcctcaccatcccctgggccagaagctggccccggaagaacagcctgctgttctggaaagagcatggcctcctgggtcagaatgacccagctctgatgagcagcatcaccactttctaattacaacagtgggcaagtcatctagattctgagctttaggtctttgagatgtaaaatagacataataagaaccactttgcaggctgttatgaggattcaaacagtgtaatatgatcagctcctactgtgttctctataaaaggtcgctcatgtcagtgctggcaggataaggctactggtcaatgtggccatcaggctgacaactactaaccagcttttatggagctctgattactggctggatctcgagctaacggtctgtatgtgttccctcttctcattttgtcgcaatatcctgtgaggtaggtacatttattataacctcaggctttagtgatgagagagctaaatttgagaggctccaagcctggatttgaatggatatccatgaacacgaagctctactgtctatccatagctagctagtttttcaactgctgacatcctcaaaggccctgaggtcctgcctatctgtccctgaggttcctgcaactgccaggaggctcagcctcctcacccctaccagcagagacttattaaggccagtgaacaggcagacatgtagccacggagttggcccgacatgatccatatgaggtggtgcaacactgcggctgtccagttcaccatgtggtgtgccatgagagaggtctgtagtgttctggggcaatctaagcatgaccccaaaccatataaatgcacatgtatcttaacaactaagtcactgaatgcacagccacattctgtgtcttacatgctgatcagtgccctaagcacttaaaggacattatatcaatatctaaccacagccatcttagtcaagttttcattactcattagtacattcacacatttattgacacaacagacagccttagtggtaccagccactgtgcttgctcagggaaaacagagtaacccacagctcctgtcctgaagggtctgctcatctaagtggcggtcaacagtttatgttgcaaagatgagaacactgatctttagtaggagcaagtccctggtccaggtgaggtctggtgcctccaaagccaatctttgcactgagccaggccattcccagccatcaggaggccatgctgtactggacccatgatgctgacacatcttgggaccccctcagggttgtggctcttgtctccaccagacacaagcccatgtgtgggaattgagcaagacctcatgtttgtggtcacagctgacctggaatgcaggtccagggtagagatcacacaactgtccagtgggcagtgaatttttcctggctataaacaactgttgctctctaacgacacatacccagagaactcagagggacctctactgatgatatcagtcgaaaatatcaccatggatcaggcttaaagagctccactccccaatgaaagcttgggtgtttggggtctgggtactaccagctaccactggctctctgttaagacttctgggttacagacaaaataccacaaccaaagaaaaccacaatggggagtatagaagcagcatgggttgtcccaccattgcacacatgatgaaatcgaaactgcctctcatgccccctcagagcctgtgttctgggctctgccttcttccctgtcctcacctaatgcctgctcccatatcacccaatagtctcactggccatttttctgcttcttaaatgtgctaagtgctaccccagacatgactttcacatggggttttagtcttaggaagtttcttcctcccccaagttgaaagccaaccctggcagcctcataatgacttttggcaagacatttcacctctctgtgccttgatttccttctctgtaaaatgggaaaataggaataaccatctcaaaggactggcatgcaaatgaggattcaacactatttgccaagcatggaggatactccttggcactagaacatgctagacccatgtgagctgttttataattagtcatccttcaagcttccccttacatgttagctccttagtgagggtttctctagtcctccagtggacagcactcaccatgtggtgtttcctggaacctctactttgattcatttttttaaatcacagctctgcctgcactttgattgagctaatttttttagggtcagtgattgtatctctagaccataagcttagtagtgctgaacatcatactaggcaaagcacagaagatcctcaaatcaaatgactgtaagaataatttggtgaatcccagtgggagagacttaggatatagtaatgaaagctcaaaagaaagcattttcatgatcaggaatatcctaaatccacaacctaaatgtttgcctctttcatgtctatttcctagttttatcttgagctcttgccacagaatccatgtaatgggccttatgtgatttgctgttagactttatccttgggcagtggaatagggtgggagagggcagaggggctgttggggaggggagtgacaaaacctaatgtgcgttttgggaataacactttacctgcagtgtggagagtagactgggaagagaagagctaaggcagaaagctgctaggatggctcaatgttgtctgtggtggggccagcatggtggggcaggggccagggccccggtggctgagttgatgacgtcagtggctatagctcaccttgattgtgtcttacaggatcctggagctgcaggacacaggggacctggatgtgctgaagcagaagtggtggccgcacatgggccgctgtgacctcaccagccatgccagcgcccaggccgacggcaaatccctcaagctgcacagcttcgccggggtcttctgcatcctggccattggcctgctcctggcctgcctggtggctgccctggagttgtggtggaacagcaaccggtgccaccaggagacccccaaggaggtcagcaccctggggcctgccctccctttcacagcctagaggcaggagtgtcacactgggccattgggagggcaggttgtttctagttagtatttacctgagtcatcttgtctggaggcagcagtgttttatattgggggattttgttattgttttattttgtttttaaaactagagaagaaatgtaggggatgttttcatgcttgaacaaagtgctgcagtaccagccttagccactaaagtcctgtatttatctatagagcaggtacagcgtgggcagcgccagagagcccttccctaccctgccccgcccatgtgcctccaccctgacctggagagaccacctgtagggtaagagaggagcccattccttcctgattctcttttacttctcaccaagggacacagggcgctgctctcccagcgcatcaggggatccctgtccctcccagcactcctttctccctatattcctcctgcttgcagggcccagccttgcccctgtccctcctgggtgcacccagcctgggggacactagctctgtccacactccgggttctgggcacacatttctccccatgtgtgccaactgcaaactgattctgcccctccacacttccttcttactgggtttgtgttctgcaagctcttttttaaatttttttttttttctgaaataaagccttcaccaaggtcccccggagacctttgccctacggaagggtggaaagtagtgtcatttggtggtgatgctttgccagcagaaactccacatgcccagccacaccatccgtggggctgtcactctctgccacatagacctcagctatgtctagaaccacagctctgcttagagactctgtgggtgcagatggatataaacctcaaacaggaagtggtaaagcaacctgcatcaaacccaaaagcacttctgttttgttttgttttttgtctgtttttgtttttactggaggctcagatagtacagggcagttcattaaatggtttcagaggtagaaggtccaaggggcacaaaaaataaactgggacaggaaagaaaaacagccaggaggaggtaagagccggcgggctccttctcagactgatttggggaagggatttggcacctctggacagcaaggctgggtccaccatgtgtgtggcctgggtgtctggccacatcgcaccctccattcattggtccataagggcattcctggcaggtcaggggtgaggacaggggtgggcgtccctcgctccttacaggactctgcattataccaggtagtgagctctctgtccttatgctgtctcttccctggaaggacactgcttaactcagtacatctgcaatgttcggggatatctgtcttcctctctggccttctgtgtatctccatgtaagggaatgtgaagctggggccagctgcagcctcagtggctgtcctatcacccctggagctcagaagggaaggaagacagacctttgaggaaaaggccctgaaaggaatagttgatggttctgtcccaagcttctttggctactggaaaattttgtataaagaagtcagtgggagggacagtgaattattctgactagcagttgtaaggaagggctacacatatctgacctctcctcatcatgtcagcccctccacgccatgaccagtgtgcacccttcacctgcttgttaccacccaggtctctatgcacagaagcatcagtaggcagctgtgatggggtggccccaaagccacccccagtagaaccaagaaggatgagaaggatgggaaagaccaggcccccaaattggcacacgttgcacccgctccgtgttgtttgttttggattttgcttgttttccctaagtcttcaacctggtttcctctgtgcaaaggccccttgtgtcagcggagcaggggagggtctccaggtggatgaaaattgcactgtcaggaatttgtcttcctgggcagctgtgggcaagggtgggggcctggagacacaggttcaggctcagccccagcctctagcctatcatctgtgagccacatgcagggagagcttgtcctttggatgggaagtcattgtctgcttttagctttgtcccttcacaatgcctagtttagtgacggtttggacaatttcagcctggaccacccacagttaattgttgtggtctatgtgtgtgagagagacagagaaagagagagagagactggtgattgttaaagagacatagataggaagacagaaaagaaaagagaaaaaaatggagagaccaggagaccaagggataacctagctgtgaggaacagctcctttcttgccggtaaaacatcctaccttttattctggcttctgcataagtccaggatctcagttatgaaatgatgaatacattagccctgcttccagaatgtgggacttcctgcccctgttgccaacctgcttccagataggaatgaggacacatggagagaggcaggttggaaaagcacagcagctgcctgtcctccaaccccttctggtgttgctaagaagggttgcatggaaatgttccatctttttcatatttttatgggtttccaaatttcaaatgcaatgtctcccttccttcttccctctctccctttcttcctttaataagcctgcctatagagacctggcccctgccttcagggagcttacttcctcatgcacagatgtggcagagagctgggcccagcagtctccactcattgagcaggctgtactgcagtgatcagcaggtatcacaaaagcaccgaggacatccagcccagccagggcatggtggggtcagaggggttaggggtgctggttattgaagactacttggggctcagagctgttagaactgagctttgaagcattgatacaaaccctggtactaaagatgagataggaagttgcattttgggcagggtgaacagctggaggtgaacaaagtcatcatacctcctggagctcaagggctgaagtgtcaacgtgaggaaggagatgctggcaggggaggctggggaaggatacggggcctgctccgaaggacttaaatgccagactgagaggttttgactttatcatgcagggaataggcaggaaacggctcaaaacgacagtcttttagaagcatattcttaaaaccttcaaaaaataatgatggtatttaatccggaactactttgtgctactggttgcctgtgttttatggggcagcatttgcaattaggtgagagtgtctggttaatctttgaatgtttcattttgaggcattggccatatttcttaagagccagaaacctgtctttgggtggagcccaagttgtgcttaatggcttgctctaggatgtcgtcacagtttagacacttacttgaagaagagtagtaatgtgctttcaaccccttaatattcatgtagatttcagctcatattttttctaaggaatcagacgattatgtagttacccaatgcaggtgaatgcaccaaactccatggatgcagtaaagagccactcgctagatttatgggggatgtggagccattgctctgagaataaaatattcatgaaataaagatgagaactgcacaaatgggagacgacatgaggagtgagggatgagtcatccatcactgggctcagagtttggaattcttgttgctttctgccttgcctgccctcccctggcccggtttccatcgcacacaggagctggctgaggccagggtggccgggcagcaggggacagagaagcagatggcccctctgttctggctgtgggcagcctctgtctgcatgccccaacccactgtgaaagattagatcccaggggccctcacttcttcaactccacaccctttcttgcctccactcctttgatgtcttcttcaactgcatgtaaagagtttgccagtctgcacatttttcttcttcatttatgccaacccacagcgttgcactgaggattcaacaagggaaggcatataaagtgaattaaagatgtgcctggcccagagacacgcttggttgttggtggccaaggggctactctatccaaaggtcctgggctaggcaatgaggaatatgggagagacaagtgacaccttagggctcctttcctgtgctgagcaatcttgttagccctcttcagtagttgaagaaggcatccttatccctgatgaaatccctctcagaagtgagaagggtagagatgggatgtgaatgatgtgtctacctctgtacccctgctgcctcccaggcgcaagcttgtcaaaaggccagggcactgtcctttcctctgggtatgtgcatgagcccattgggttccgaggtagcattttccagaggacttgggagtgaaggttgtgactcagtgctctacccagggccaggctcctggatcctggcttctggctacacatttacattatctgaacctcagtctctcccttctgctggaaacagcctggcctgagaactatgctcaggagcaaatggcttagcatgagagtaagaatagtgagtgtgcatgtttcagcccacggcctccagtgagaagccatggaacatttaccatacaccgctgtgtatctcaaaaccagatcacttggcaaagcctcccctgcttgctgccaccactagcagccccccttgctgggtatgctccacattgccagtaatggtttacctgcctgtctctgcttcagatccaccagtgcctcctcacctctgcattgccatcaatgtgccttctctctggaacagtggaagctcttattaaggggtgatgaatataattcaagtattgagcactttctatgtgccagggaccaagatagatgctttaccaagaacattagctcatctggtagtaggagctcaaacacgtttattgaatgaatgaactagtcaagactcccgtaaagaagacattactaatgttaaattgttgtgtaatcattgcacctggatcaatggcttttaattctggctgcatgtcagaggtgattaattctggggctttttagaaatacagatgcttgggccctgtttcccaaagggtcatattagggagatctggactgccataatttctaaaatctccacctgtgcttctgatatccagccaaggatgaaaaccactgatttatgccaacattccaaggtaaggagctacgggggtaatgaaatttgagtagaatgaagtctcactggtatggggaggatgaatttcttgacacactggtgtcatggaaaagagcccaggttttgggctgggtgtagtggcgcatgcctataatcccagcactttgggaagccaaggcagaattgcttgaagccaggagttggagaccagcttgggcaaaaaaagctagaccccagtctctacaatttttttttaattagccaggtgagatggtatgtgactgtagtccgagctactcaggaggctgaggcaagaggattgcttgagcccaggagttcaaggctgcagtgagccgagattgggccactgcactctagcctgggtgacagagggagaccctgtctcaaacaaacaaacaaaaaaaaaaaaaaaaggaaaaggaaagagcccaggtttgggaacctggtagatgtgagttctcgtcctgaccttccacttactgtggaattgcctgagcttcagcaagctgccttacccctagcctcagtcattcctcggtgcacctgctgctaccacccacgatgtgaagtcattgtcggttcgctctcattgccctccctaaaacatctgcgattgaactgatcagaactctttctcctgatgctttgaaaaactgcccaccatctcctgagaccatttcacttacgtacttgagctcctttgtccttacccagccaatactctcagacccctagcccggcccgttggggttgggtaagtcttgggaacaacactgaagattgtgttggtagcatttctcccagcccttgggtcccatttagcacctgattggtgtcagtggtaataggataatgccaccaacagccagctcagtcagggggaagttcctcatccccatttttgttcctgcccaacttacaataagagctgttggactccaagcaaagtctgttctaaggagtcccatgtgtaacaggctgttacaaagatgatagtttagttaattaccgttttccaatacactgtattatttccacattggtgaacagcagcttaattacagaactttatctctgcaagacaatgcctgggagaggttccccagtaacctctgttggtgcatctgtcgtcatgtttaatatgggatgagaaacgcagagctggaattcagccggattcacgggtaaacacagtctgtgaattttatatcatattcagggatgtttgactaggtcagttacctacagtaaattaatgaagatagcagtaagtttccaagtctgttttcacagctgtcattacctggccgaataccgaaaccttgggataatgaggatgtaaacggatgtagttcacataaaaaagcccattatttgaatttgcataacataatagaatgcagtattttgtctaaaagatagataattattcaaatcactcctgcctctttccttgagtaggctgattactcctgtctcctctttccttggctggagacacagaaggaacagacagacatgactttatgagtgctaaatctatgaccccaggtaatacaagcagaccatgcttccaaggtttccaaaccaggcggtctgtcctgcgcacctcagctctggctcccacagacagcagcaggagcaggcgacttaaaggacacattgtgagacacagcaaatggctgcgtttgttttccaggaaagataggagtcatttgctgcagttatacacattttcttattcagttaaataaccaaaataagagacttgagatggcaccctcatctcctagggtttgtcctcgtgttggagctattgggaattgatggaatttgagtagaatgaagtcccactgatgtgaagaggatggatttcttaataagcagttgggaaggaaaccccctggaacgtttgtccatttggtgtagacactttctgtgtgtcttgacacggagactttaaaggcgaatgataactgcagtagggagttggttcccgctgcgcagctttgcagtccttagaactgcttcatccatacttgatttgagacaagcaaaaaaaaatgtgagtaaaataaacttagtcaagctctttcttcagaaataatagactggcagagaactagttatctccacattcagtctgagggctggccttgattctaaatgctccattattaccggatccactccccaccaccgcgtttactattccagcttggcacttgacaatccaccatgctccagtgttctctcacttgcacttcagtggtgaagtcatccagctcagagacttccctcacttacatcttccttcagagaattttggctggtctgtcttccccgaagctcccatgtttgtttccctggcattaaatagagagagttctttcaccttgtcccttacttccaacctcctacctccctgtggctttcttcttggacaggaagttaatctttccctctctccaaactctaacaaaatgggagcatctcctgaacaccctgggctagtgctcaattgactgagaaaaaaggccaggccctctatcaactgccagaatccagagttgagcagccctggaacctagacacctgcttcccactttaattgagtccactcaaactttctttcttttcatcttcaaaggggtccttaaagtcctgaagggaaattagaaaagaggataagggaagattatgcaactgattaattactaactagttcttccaatggtcccaggtcatcagtttcccttccgtggaaatgaaagtctttgacagtgagggtgaccagcttgttcaggcttctccaagctttgctagctgcaaagaagagagaaggttatcttattaaaccctaaaagtacctgaatttctttctcaactacttcagcttccagactccctggtacttgttttgtgcccttcatacattttgaaatgaacatgccttatagatacaaatattcgccaaaacgattgtagcactgattctggctaatacagatgacactgtatccacagtttaacaggagctcatagcagccccaagaatgctagagatgcaggcttgatgctgggcaagagtcagggcttgtctggaggcccagaacactaggaggatggctgtggaaaagaaagtttggcagagtcccactgctgcagcagatgaagcacctgctgctttctgtctctctgtctctttgttccggattcagcttcagtcttactgtccttatttggatcatggtcctgtctcttcgttaggtaacctgtctcttgatagtctgtcaaactgttatccggtggggatagtaactccctaaaagcaataaaccatagacttccttgggaaaagatcattgatgctgagtggcgctaagccactaacacactgtataacggttataaaatattcctaaagtagtcttacatgcaaaaatgaaaacaaagcaaataaaatagaatacacaaaaagtagcaaagttgaacagaactggctccaccatggtgtaaggtaattaggaaaataacttgaatttggtttgctctatattttacaaacctttgaaggagtcagcataaacatttcatgaataatttagctgggacaagtagaagcctggcattctccagccagttcccacaatttcccgacgacacttgccatgcagaggtgaccctaactcagagatggtctcccagcacgaatgagctgagctctgcttgtgtgggtgggcttcagatcactgaagttgtgactgtgcctgtgaggctgtgccaatggtttctgatgtcattttcacctatgacagcgagccacatcccatagcatcctctattctcaaactagttggctgtcttgatttcctcctgccctggaatgacttgtcagttgtcctatgggtgttgtcagttttcttgtcctgggaaagattctaggactgacagcaggtgtctcatcagaagccaaaccatgtgtgccaaccatgaactcataaaggtgcggagagagcagtggtcccaccttctatatgccaggggacattgaggcaaggagtgaactgcagagcacttcacctccttgcttgaggaacactgagttgaccctttgtgggggttagccctgtgattcatgcactcatctggtcagggctcatgcctatcattcagttgaacttctgggggtggaaatcctctcccactgtccccacagaagctcaaagcagtcactggaatggctcttagattcatgtgattccttctttttccttctgaaggcatattcagggcttctacatttcttaatatttctaactcccctgcaaggtggacaggggatgggttcctttctccaatacaagatgccaacatgagaccacctgcagggtggcctgggagctgagctttgggactgtatttctctaggagtttgaggtgagggaaaggtcaccacattccctggcgcatcagcacccatgctgcttacaaagtccctgcagcctcaacctcaccgggaagctcatatggctcctctgctgagcaccaggtcctgtgcccacctcacagcggggaagccaaggaaggagatgacgtcttccttgagctttcaggcagtttgtctgcctttaattattctgacattgtagggaaatcatcaagttatttgaaaggaacaatatttgttctgttttgttttctttcttaagcaaataaacaagccaagtaatttcctgtgatatcacccactgtggtgagacagtatcaggtgtgagatcacccacttagatagccttgaaccctcatgaaaccaggagggtcagctgaccctggggaagtcccattcctcacaatctccacccaggaacccacgcccccttgcccttccagacagggatatgtccccctccttgggctgcctgaagagattgcacagggaggacacaggtcactgggtgaggcagggcttctctctggctccaggcctccaagctgcctctaacactgatggtcctgtgactctgatgaatcattgaaccttcctgagcctgagcctccttttgtgcaaggtggggatgatcatacaaagtcttttcatcatcttgaactctaagtggcaaattcatgggacaccttaggggctcaaggactatttcctttattcctgtgggacttcttctcctgtctctgcctgctcttgaaagcatcttgtcctaagggttggttctgggtatggcagtgactctaaactgagtacagaggcaaggcaggatgcagccaaggcctgttgatggcatcttctttgctacatagggatcatgtctcccccctggcttctccagataactgagggttggccatataattgaggggaggtgggagccacatgaaagggatactcgcccacagcccaacaggctgaccaggcctggtgactacagacatccagagctgtagcaagccagccttgactcactgttagggctccacctgaccttcctatgccttccctccaggacaaagaagtgaacttggagcaggtccaccggcgcatgaacagcctcatggatgaagacattgctcacaagcagatttccccagcgtcgattgagctctcggccctggagatggggggcctggctcccacccagaccttggagccgacacgggagtaccagaacacccagctctcggtcagcacctttctgccagagcagagcagccatggcaccagccggacactctcatcagggcccagcagcaacctgccgctgccgctgagcagctcggcgaccatgccctccatgcagtgcaaacacaggtcacccaacggggggctgttccggcagagcccggtgaagacccccatccccatgtccttccagcccgtgcctggaggcgtccttccagaggctctggacacctcccacgggacctccatctgactgcgccgcctgccctcctgcccaccctcccacccacccgaccagcagagctttttaatacaagaaaacaacaacacaaaccacacacactcgcacacacacacatacacagagactctttcatttttcttgtacatatgtgtaaataatgacagaatggagtggggtaaaagtgtattttgaatattcccaattttcgaagtcagtaaaaaaacacaaaaactgtatgaatgactttgtaaattttgttctatatgaataaaaaggcaaattacttgtgatcattctgaagtgccaaaggagcccccccattcctgggcctttctgagggcaggaggggcgaccagataaggagcccctctctgctgggggagaagggaagacgaggaaccccacatgccactcgctgccttgtcccacagcttgctgccccatttctttgctcctggcacctcgtcccttttagtccctcagcttgataaagagtgagtttggagcccgcattgggctggcccactgggttgctgtgctgtagggtgatcggctgttctgggtagcctggggctgaggaggtgccctggactcagggctatcctgtcctgtcttggatcttgcgggacgagttagtcaccgctgtgtgtgttgcagtgtgcctctgccccatgggcccgagagaagctgacaattacccatagtgaggtaattgagggctttgatactgagctgttctcatatcatactgttggccttgtttttcattttcttttcaaaattagaagaatcaaaaagtgatagaatattgggggaaggagggcagactccatcgtttcctcagggagactgggcggaggtggggttggtctggaagaaggtccatgggggcagggagttgcgaggtggggttagttgcatggaccaggtgaggtggtggaacaaaaggccaggtagaggaagaatattcccttgggtttggacccatggtcccaggtgagagaaggaagtgaggccatagatgcagggagtagaagctttgtggtgtcaggcaaacggactctgttagtaagagttgggggaggtgcccaggtgggtggaccagtactccaggtgatggggcatgctgagaaatagagaaaagagaccatgtttatttgggtaggaggaagccttgccttgcgccttaggtgagaagcataagtgtaactcccatccaccagggaagttgcttgtagccccaaaagtaaaggcctatctctgggtcataaatcctgcaggcagtccaacaaacagggctggctccagcacaaactctcccttccacctttacgaccctctccagaccagacctggagtcctcttcaagcagcaatccaacccagagcaggggccctccccactcaggcatctgataacctctgagatttccaggcctatccctgtgcaggtacagctgcagggaagcccagttttctaagcctaggaccacctaacagcgccccctccttcagttgccctttctgaggcaactaaactacagaatcagggaaagaaccattaggagtggaactgggggaatctgagttgtgtcacttcagttcctctcctaaagacaaaggttagtctgatctccagacccgtcagaatggaatacacagcccacatctgtcactgaaggaggtggagctcccacagccagcagtaatcagggagctgagagcctggttctgtgatcatggagaaatacaaagtcctattgattgcttcttctatagccttgtagagtttctagagagatgtatttatgagggtgataactagcccaggattgatttctttcctaaagtccctagtgacatgattgagcagtaaagaacggccaaatcacacagtcagctaaaagcactgtggggaagagagtgtttataattatgttatttattgctggatgctgagaatggtctgatattcgtgctacctaggcaatccattgacatttctccaatcagagcatgtggaccttggagccaggcatgctcagagaagcctaggtgggctaccatgaccccgaggaagagcaggctttgttttccatcagcacgttgggggccctgccctgaatggtcaatttttcacatatatatctctctatttttttaatcaaactctggtctcactgccttatctcacaccaactctgtttcctcattgccccctgagatggcctgtcttctggggtatagcttggatgtcttcttggatggttctgcttagaatgagtgtcaaggaggaaagagagggagatggaggatgtgtttgtgcgcctgtgtgtgtgtgtttgtgtgtgtgtgtgtgtgtgtgagagagagagagagagagagagagagaccagcatcttcaagagaagtattctgcttatacaaaatccttaacacctcatggtgttattcttcaccatgtttatatatatatatatatatttttttttttttttagaattttctacccttggcatgaggggaaatgattgatattcaagcaagttctctaggaaaaaaaaaaacttcccaactcagatttctgtgtcagctcagaatgtatctttttttcatgctttgctctttggatttataactctgtttagactattccatacattttaggtatattttgtgccttcagacactgcaaataataatcagcatttggattaaagttgtttaataataaatcttgtctttgctccctatgctcttattctctggggtgaagaaatactgtctgcttgtttctgggcatgctgagatcatgaagtaaattctgtgctatcagcagggacagtcatgaggaaaactcctctcctcaagggggtctcagatatgcctggaggtgggggcaggccctcctcacccagtgcatatccagagttccctgaaaccaaccaggggacagtgtgagggacaggctgaggagcaagtctaatttttggttaacctaacagtgttctttaaaatattacgttcttggaagtgtcttaggagagaactgggtcatcatcatgcgtagagaagtgctcccatggcctggaggaatgaacacccctttaattgtcagctgactgtgctgccactctcatctctgcactcaccctgacctcagataagttgcttccctgtgcttaggtctcagagctaagggactgtcattcctggtggagcacagcttggctggacccccagcttggcttctcaaaatttggcccttacaggatctgtggagacctttctccaatgaacatcttatgccctcagtcatcctacaggcctcaagccatcaacctgatcttccacccccagatgtgtgtgcttttcagccgacctctgaaaaagtcccctggcttcagtgactttgtgggggacagccccgctgtcggcctcaagctcagtaaagctgatctgaggaggctgtctgacatgatcaaaatttcttcttctagaaaccaaaaggaggatgcccagccctagttcttctgccctgcaccaaggacaggcttctccacgttggggccactcctcagactggggctgaggggcgggcaacagacaccgctggattctgtgagcagatgggtggacaggagcagctgcagggaaccacaaagggctgttttcttaagaagaagctgcctagttcctaaatcagaaatcccccgaatagtgccaaggtaaaactaattccatacctaatgtttgtcttttcaagtactaaaggagaagcagacacattaaagaagaaaagaccagtggtcctaaaggccacgaggacatggagggacgcagtctatggcctgtgcgttttcatttaaaagtcattccatttaataatagatgatagaaatataaaaaattgaaatattaaacatattttaaatattattaaataacagagatgggcaaggtctaacggataactcaggtctctatgtgaccttctgctcccaaggtgaaggggtcacttaattgagtgcctccagcttcgttttcaggaaactttcactcccaaaagtatctgctcatgaattagcatctgtgtcttaactagagccttgttttgtactcctagccttggcaaaagtaaatgagataaaagctccagacaattttaactgacctttccttgctgtggacacaataaaagaggcagcatttctgttcctaatgtaacatttttgtatctaaaatattcttttatgccattagttgtttttaataaaactgtttattcttattatcctcaccctttgtaccaagaaactgcacataaataaccctcttctatgccaataactttaatcattgtcttttttttttttttttttgtctctcagtggtggtatttagtcagaggagattacttatgagagaagtgaacctattccagataaatcaggtgagctaatagtcacctcctacaaaagaggaagggacaattgtctgtaatgtctgatcatccctcccctgccagcatttattgtctttattgtctcacctctgaacttgacattgagcactgagctcaaaagataatagaaattctgtctgcaggaaaaacaaaaaacaaaaaagatgggcacagaagtttacaatggccaatggctgggatctgcaagatagggcactagatagatctggattacttagggtgagcaaccaaatgtgacccaaggagagctcagttgctggcagattcaagtagacagttgccaggggctcaggggtgtccaaactcagaggaaaacaaaatattcaccaacatatggagacttgtacatctaaaataagtatacacagacacatatacacatatgtacatgttcatgcacaaacaccgaagtccatgcaaacacagtcaccatatcaggcacatgcatgtagagttttaaagcacatggcaatgcgcttgggtgacataagcaaatggagataggctcatcagaaacagaacccaggggagaaaagaggctgtttcagggcttccctgcccagtgcacagtctcaatacaacaatcagccaagcggtgctctgcaatcagctgccgaggagggaggagcacctcctgcaatgcggcctgctgtctgcaaagctgcctggtgtgctcaccaaaccctcctgtgtcatcagtcccttgctctaaaatcctgacttgcaaccagaatccctgaaatatgcaaagaagccccaagcattctccaaaacatcctgcttcctaataagaaaacccattatcatccgtatcagtgaccgtttcttgatcaggtgtgctgtttgagagactgtgctatacccctcacatacaaacactctcttattctcagatcagccatgcaaggtaaaaaaatattataaatagatttatagataggaaaactgaaactcaaaaagacatggttccaaagctggtgagagacagtgctgggattcactttcttgtctatctgagtccttagtgagtactcctgccagtacagctggctctccctcccagagagcatacccactgtgcctcagctgctgcacctgtgctgaccttccctgtcaccagcctatcaggtacctcagcctccacatctgctgccttctctccagtggcttcagggcagtcggtgagtatctgcttgtgcacccctgcagtggctgtaggtaggctgggctaacagggtcatttgtaaccacagagttgggctggatatctgctcccctgaagttgcctaagccaggcagggcatcagtctgtcaggcttactcagaagctgggctgttcctttatggatatctccttcctcccctagactccccaagaggcatatcctccttctgccgaaggtaaagtgtgcatcaagctaagggaaactctgagactaactagtgctctaaagagttttaggattctcccccgggcaggaattccttcaccaaagtcccttgatagacctcagaggtgcctgaaaacctccaaaaattatctgccaaattgcttgtgcatgtgtgtatgcatgtgtgtatgtgccttttttccaggaacctggttcatatcttccacatattcctaaaattctcgtataaaagctctaagccacttccgttaagagttgtgagtcaggcaagcctctgcatctcactcttccaaggtgagtgtttaggtgcaatcttattttgatgctcatctgaggtgaaaagcagaacagtagccgaggagggagtgtagaaaatgcattgcagatgggggcgttgtggctttgactaagaggaggtgggaaaatcccactggcagggcaccgtgggcaccatgagatacatgggcaacagggtagggctggtgacctgatcctggcacccaggaaagtgctcaagataagtcaaaggaaagaacactaaaactggccaggtctggactggattcctatgtctggccattattggaggtgacatcttgagcacattcctttttacttctttgagtctctctgtttcattcttatattagtgacaataatacctatatcttctatttggtgaaaattccatagttagtaatcataaaaaaaagctgcaattgggagttgcttcccacaacacagctttgcagtccttagaactgctttacccatccttaatttgaggcaagcaaaaaaaaaatgggtgaaataaacttattcaagctcttccttcagaaataatagactggcagggaattggctgtctccacactcagtccctgggctgatcttggttctaaatgctccagtattacctgatccactccccaccactgtgtttactattccagcttggcgcctgtgccctgccacttgacaatccaccaccctccagcatcctctcgcttgcacttcagtggtgaagtcgacctgctcagagacctccctcgctcacatcttccttcagaggattttggctggtctgtcttcccctgaagctctcatgcttgtttccctggcattaagtagagagggttcctttcaccttgcctcctgctttcaaccccttacctccctgtggctttcttggatgggaagggtcagtgccctgcctgggatatatccacatttcctctgttctcctaggcctagctccctgggcaaggggtgcagggagaagggattcgtgcaccttagatggagacaaatgctagacaaatgctatggcaataaaataagtgagacctgcttttgcattttggctctggactttacagttgtatgattttggatttgaagtgataagaatgaattcacagagctatatgtgtgattcatgattgctgaaatgatgttttcccagttcataagctcccctcttctgccagctgagcctcttgcagaacctatacagttcccaaagaccagagctggctcttgacaagcaaagccatgcttccttttgctttgtggcaaattactttttttcctgcaaaacagcatggcctagtgctgattcagtagatcagagtaggaaaagacagatctggcttaaaaatctgttctttgccactcactagatgggtatccttgatcctattaccaatgtctctgagccttctttctccccctcacctgtagaatggattctgagtcctgagctgttttgaagatcagtgataatgtgggtaaggtacctgcacaaacacactcttataaatagcagctcttgtgatttgcacacctacagcatcctgcctcttggtgtgaactgctcaggcttttagcttagtcacccatctcatttgtaacattcacgtacagaccacttccttccagcttgtcagctgagacagaggaaggaagcatttccattttcgtccctagaactggaatgcttgcattgggtctcactctcccactggaagctggctgtaacagcagccctcacttctgttcccgagaccctctcaggtaatcactctgattgttatcagaaagcaaatgaaaagcagcctggcttacctagagaggagtgatttgattgtgagaggctcagtcagtgccctctcagctcctgactttcagacatgctcatgatgaagtgcagccgaaaagaagcaaacttcagcgaaactagctctccaaagctggtggagatatctatgcatcctccagaatatagtttgagaggtaaggtttatggccatatagttcaaaaaacaaagaccttcagaggttcctggggtgatggccctgtgcttttcaggtagcatccaaccccttgtgttttatgggggaaataaatgcacacacctgaagcaatgagctgtgtatgtgctgggattattttacatctattccatcatgtctgcttttttttagcttctgcctctaccttaggcccgaagcccaaaggtagttgaatcttcttttgttggcaacttgtcatctggctaggctaagtaatctcacatagaaggtgcttgttgtattctagagaaaatgacccagtgagctgctatgtcagtaaggatcctgcatggtaagaaagagatggcacagggaaactgagaaatttggggagagagactatttggaaagatgtgcacaggcaaagcaaagtcacaaggagaactgatgattaatgagattgagccttttacacatgcttatgtgcatattgcttttgtgagctgtctcttttcttccatagtggagaagcctgagtgtattgggtctcactctcccactgggagctggcagtaacagcagccctcacttctgttaaaaagtgagcacacccttacccacggatggcccaacaaggtggaaggagggagcacatgttctaactacggtcaggactgcctgacaggagctgagcccagctccagagataagccattcaatggtgactctacaagcagccagctgcgggagtgcatactctgacttcactggtctcctgccagcgaatctcctgccaatccctagagcagatggcaagggagtccactgaggcagagtagagaaagatggaaaatgggtgtggggcagggaagaaataaaatatatttcctctaggggagtcgagaggggaaagaaaaggaattcacatggatcatatgcctagcatgtcccaggagaattaattccttctccccctggaaaattaaagaaatctctttttgataaatgcagaaaatgagacttagggtagttgagtggtttgctcaaggccattcatcttgtctgtcagcctaaataaagctcatgctttttctgccctgaattgccccacatgttccgaagatggcgacacaagacacatcagacagagggtcacctccccagatcttggtctcagccaccaaggactgcaagcttgcaggtgaggacaggcagtgtggagggtgtggcattcagggagaaaacactagttagcctttttgcagttggggtagtgtgaatgtatcctgcataattctaatttggctgtgggaggccactattctgaatggatccctaaagaatactaaggcacagaattacacaggagtcagtgttggaatcagaaaggtgtgattttggagggaggtttttagttacatgaccatgagtaagtcccttaacttctctgagcatcagcttccatatctatgaaatctaaacaacgtgagcagcaattttattttgaataatgaactaagaaaaccgggaggctgggcatggtggctcacgcctgtaatcccagccctttgggaggccaaggcgggtgaatcacctgatgtcgagaccagcctggccaacatggggaaaccatgtctctactaaaaatacaaaaaaatagccaggtgtggtggtgggcacctgtaatcccagctactcgagaggctgaggcaggagaattgcttgaaccccagaggtggaggttgcaatgagccgaggttgcaccatcacattgcagcctgggcaacaacagcaaaacaccatctcggaaaaaaaaaaaaaaaaaaaagaaagaaagaaagaaaagaaaaggaaaagaaaagaaaagaaaactcggactaaagtacctagtgccagtggctgacatacagcaagtgctcagtaatgatgaccattagcagtacaggaaaatggtcatggaaggcccaattacaaggtcacagttttataatatacttgttcagaaaattataaaatttacttagaaaggtgcacaaatcataagtatagaggttggttaattttaacagtgtgagtgctcttgtgtaggccctaacccaaaatgagaatagaatttcctcttgtatacttcctcagttgacaactctggaactctgaaggtaatcagtactataaattctagaaccgttgattaatttcatctattttagatatacgttgagatagaatcaattatacttttttctattttttttttttaattcaacactggctttagggactttatgtttctgcatgaagttcatttcattgttttacaggatttctttgtatgaatatgccacaatttatgcattctactgtcaatagacttttgatttgtgttcgttttgggttataacaagcagtatcccaataaacattttttggacatgttgggtgaatttatgtatgcttttctgttggtttgctgggtcacaagtatgcatgtgttcaattttatgtagatactgctaaacagttttcagaaatagttgtactgatttatgcagttgacctgcagtgtttgagagctgcagttgtcccacatcctcattaacacctgtgctatcatatattttaattttcagccattctagtgggaatgtggtacacttaattgtgattttaatttgcatttactgatgattaatgagattgcgcattttacatatgccgatttgtatattgcttttgtgagctgtctcttttcttccatagcatggtttaccttttcactttctttgtggtatcttttgatgaacagaagttgttaatttaaatgtaagttcattttcaacttttttttttttccttcggtgttagatatgtcctgtttctgaaaactgcctaaaccaggccacaaagatattcttttgttttcttctgggtgttttgtgttgatgtttgttttgcctttacatttacatctgcaagctgcctggaatcaattttttagtatgatatcagaaagaggttataacatgtttttaatatggacatttgtttattacagaatcatttatagaaaaaagtccctttctcattacactgcagcatcagatttatcatgaatatagtgatcttatgtgtgtaggcctgttttcattatcatattctgttgatccatttgtctgtttttgcactaacgtcctactgtcttagttgatgtaactttgtcatcaatcttgattatctggttatgtgagtcagtcctttgcatttacacataaattttaaaacatcatgctattttctggaaaattactcttgagattttggccaaaactgcattgaatccacagataaactttgaaaaaattaatacctttccatttcttactttcaacttttctgtgttcttatatttaaggtgcgacatttgaaagcagtttgaggctctgcgtgtgtgtccgtatgtgtgtgtgttttaatacggtgtttaaaatatttaattagtgcattcacattcaacataattgctgatgtatttggatttagatctatagtctttttttctatttttccctcttgttctattttaattatcccctttttgccttcttagtagttaaaataatgctttgttattcagtatcctctctctgttagcttgttggttgtacatttttatattcttaaagggattatcctatagatataaatatatattttaccatgtccaagacaaaatcgggatcttaaaacaccttaacttcatttaacccattccattttttataattgtaattttacatatattttcaacaaaacttcaataataattttttaactattgttacatacagtaaggaatcatttgggcttttcaatatatttatttttttctgtgtctgtttatttcttcctctatgtctctgtttctttctgagatatttttcttctgcctgaaaaaacacttttaagaattacaaataaagctgctacaaatatccatttgtaggtttttggtggccattaagtttttaaatcatttgggtaaatacctaaaagcgcaattggtggtttggataataagactgtgtttgtcacaatttaccgaatttgtcagaaattaccaaactgtcttccaaagtgactgtattcaccatcaataaatgaaagttcctattgcttctcatttgatactatcactgtttcggactttgtccattctaaaagatagttgtgctatctctttgttttaatttgcagttccctaatggcatatgatgtggagcatctttttatatgcttatttgatatctgtatgttttctttgatgaagtgtctgttcaggtcttttgcccatgttttaaattgagttgtttgattttttattgttgaatataagagttctttgtatatttttgataataatctttttatcagatatgtctgttgaaaatatattctcccagtctgtggttgtcttctcatgctcttgacagtgtcttcagcagagcagaaatttttaattttaatgcagtcaccttattgg

SEQ ID NO: 5 - DNA, 3286 bp, Homo sapiens
gggggcgtcctccgcagttcgctcctcgccggggctcagacacacagccagcccagagccgccacgccggcccggccgccgccgccaccgcctcagcctcccccgaagccgctctagccgcgggaagcgccgctgccacagccgcgggccgcccccgccgcgccggcctgggctcaagctgccagcaccgccgcagccgccaccggagccggagcgggagcccgaccgcgctgggctgggctgggctgggctggggcgggcgcagggcgcaggggcgggcgcgcgggggaagacgcacgggcgggctcggctctcccggggagcggcccgggactgcaccgggaccagcgcctccccgcttcgcgctgccctcggcctcgccccgggcccgggtggatgagccgcgcgcccgggggacatggaagcgctgacgctgtggcttctcccctggatatgccagtgcgtgtcggtgcgggccgactccatcatccacatcggtgccatcttcgaggagaacgcggccaaggacgacagggtgttccagttggcggtatccgacctgagcctcaacgatgacatcctgcagagcgagaagatcacctactccatcaaggtcatcgaggccaacaacccattccaggctgtgcaggaagcctgtgacctcatgacccaggggattttggccttggtcacgtccactggctgtgcatctgccaatgccctgcagtccctcacggatgccatgcacatcccacacctctttgtccagcgcaacccgggagggtcgccacgcaccgcatgccacctgaaccccagccccgatggtgaggcctacacactggcttcgagaccacccgtccgcctcaatgatgtcatgctcaggctggtgacggagctgcgctggcagaagttcgtcatgttctacgacagcgagtatgatatccgtgggcttcaaagctttctggaccaggcctcgcggctgggccttgacgtctctttacaaaaggtggacaagaacattagccacgtattcaccagcctcttcaccacgatgaagacagaggagctgaatcgctaccgggacacgcttcgccgcgccatcctgctgctcagcccacagggagcccactccttcatcaacgaggccgtggagaccaacctggcttccaaggacagccactgggtctttgtgaatgaggaaatcagtgacccggagatcctggatctggtccatagtgcccttggaaggatgaccgtggtccggcaaatctttccgtctgcaaaggacaatcagaaatgcacgaggaacaaccaccgcatctcctccctgctctgcgacccccaggaaggctacctccagatgctgcagatctccaacctctatctgtatgacagtgttctgatgctggccaacgcctttcacaggaagctggaggaccggaagtggcatagcatggcgagcctcaactgcatacggaaatccactaagccatggaatggtgggaggtccatgctggataccatcaaaaagggccacatcactggcctcactggggtgatggagtttcgggaggacagttcgaatccctatgtccagtttgaaatccttggcactacctatagtgagacttttggcaaagacatgcgcaagttggcgacatgggactcagagaagggcttgaatggcagcttgcaagagaggcccatgggcagccgcctccaaggattgactcttaaagtggtgactgtcttggaagagcctttcgtgatggtggctgagaacatcctaggacagcccaagcgctacaaagggttctccatagatgtcctggatgcactggccaaggctctgggctttaaatatgagatttaccaagcccctgatggcaggtacggtcaccagctccataacacctcctggaacgggatgatcggggagctcatcagcaagagagcagacttggccatctctgccatcaccatcaccccagagagggagagcgttgtggacttcagcaagcggtacatggactattcagtggggattctaattaagaagcccgaggagaaaatcagcatcttctccctctttgctccatttgatttcgctgtgtgggcctgcattgcagcagccatccctgtggttggtgtgctgatatttgtgttgaacaggatacaggctgtgagggctcagagtgctgcccagcccaggccgtcagcttctgccactctgcacagcgccatctggattgtctatggagccttcgtacagcaaggtggcgaatcttccgtgaactccatggccatgcgcatcgtgatgggcagctggtggctcttcacgctcattgtgtgctcctcctacacagccaaccttgctgccttcctcacagtgtccaggatggacaaccccataaggctcatgagtggaagggacttgccttgtctcagatgagactttggactgtgaacttttggattaatgctgaaatgagttaagactttggaggattgttgggaaggcatgattccttttgaaatgtgaggacatgacatttggaggggccaggaatggaataatatggtttggctctgcctccatccaaatctcagcttgaattgtatctcccagaattcccaggagggatccagggagaggtaattgaatcatgggggccggcctttcccatgctattcttgtgatagcgaatagtctcacgagatctgatgggtttatcagggctttctgcttttgcttctccctcattttctcttgcctacgccatgtaagaagagccttttgcctcccatcatgattctgaggcctccccagccatttggaactttaagtccaattaaaccttttttttttttgttcccagtttcaggtatgtctttatcagcagcatgaaaacaaactaatacagacacttaattcctccagcactatttgttgaaaagactgttcttcttccattgaatataccgtttgcatgtgcactacgaaatgattactaaaatgaagctaagtaacatatctgttacctcacacagttatcagttttttgcatgtgatgagaatatttaagatctgctgttttagccaatctcaaatgtataacacaattttattaactatagcaccatgctgtacattatatctccagatcttattcatcatacctaactgaaattctgtactctttgacaaaaagctcataattcccccacactccagtccctggcaaccaccattctctggcaaccaataaactctccgcttctatga

SEQ ID NO: 6 - protein, 673 aa, Homo sapiens
MEALTLWLLPWICQCVSVRADSIIHIGAIFEENAAKDDRVFQLAVSDLSLNDDILQSEKITYSIKVIEANNPFQAVQEACDLMTQGILALVTSTGCASANALQSLTDAMHIPHLFVQRNPGGSPRTACHLNPSPDGEAYTLASRPPVRLNDVMLRLVTELRWQKFVMFYDSEYDIRGLQSFLDQASRLGLDVSLQKVDKNISHVFTSLFTTMKTEELNRYRDTLRRAILLLSPQGAHSFINEAVETNLASKDSHWVFVNEEISDPEILDLVHSALGRMTVVRQIFPSAKDNQKCTRNNHRISSLLCDPQEGYLQMLQISNLYLYDSVLMLANAFHRKLEDRKWHSMASLNCIRKSTKPWNGGRSMLDTIKKGHITGLTGVMEFREDSSNPYVQFEILGTTYSETFGKDMRKLATWDSEKQGSLQERPMGSRLQGLTLKVVTVLEEPFVMVAENILGQPKRYKGFSIDVLDAKALGFKYEIYQAPDGRYGHQLHNTSWNGMIGELISKRADLAISAITITPERESVVDFSKRYMDYSVGILIKKPEEKISIFSLFAPFDFAVWACIAAAIPVVGVLIFVLNRIQAVRAQSAAQPRPSASATLHSAIWIVYGAFVQQGGESSVNSMAMRIVMGSWWLFTLIVCSSYTANLAAFLTVSRMDNPIRLMSGRDLPCLR

SEQ ID NO: 7 - DNA, 6134 bp, Homo sapiens
gggggcgtcctccgcagttcgctcctcgccggggctcagacacacagccagcccagagccgccacgccggcccggccgccgccgccaccgcctcagcctcccccgaagccgctctagccgcgggaagcgccgctgccacagccgcgggccgcccccgccgcgccggcctgggctcaagctgccagcaccgccgcagccgccaccggagccggagcgggagcccgaccgcgctgggctgggctgggctgggctggggcgggcgcagggcgcaggggcgggcgcgcgggggaagacgcacgggcgggctcggctctcccggggagcggcccgggactgcaccgggaccagcgcctccccgcttcgcgctgccctcggcctcgccccgggcccgggtggatgagccgcgcgcccgggggacatggaagcgctgacgctgtggcttctcccctggatatgccagtgcgtgtcggtgcgggccgactccatcatccacatcggtgccatcttcgaggagaacgcggccaaggacgacagggtgttccagttggcggtatccgacctgagcctcaacgatgacatcctgcagagcgagaagatcacctactccatcaaggtcatcgaggccaacaacccattccaggctgtgcaggaagcctgtgacctcatgacccaggggattttggccttggtcacgtccactggctgtgcatctgccaatgccctgcagtccctcacggatgccatgcacatcccacacctctttgtccagcgcaacccgggagggtcgccacgcaccgcatgccacctgaaccccagccccgatggtgaggcctacacactggcttcgagaccacccgtccgcctcaatgatgtcatgctcaggctggtgacggagctgcgctggcagaagttcgtcatgttctacgacagcgagtatgatatccgtgggcttcaaagctttctggaccaggcctcgcggctgggccttgacgtctctttacaaaaggtggacaagaacattagccacgtattcaccagcctcttcaccacgatgaagacagaggagctgaatcgctaccgggacacgcttcgccgcgccatcctgctgctcagcccacagggagcccactccttcatcaacgagttctctctgcaggccgtggagaccaacctggcttccaaggacagccactgggtctttgtgaatgaggaaatcagtgacccggagatcctggatctggtccatagtgcccttggaaggatgaccgtggtccggcaaatctttccgtctgcaaaggacaatcagaaatgcacgaggaacaaccaccgcatctcctccctgctctgcgacccccaggaaggctacctccagatgctgcagatctccaacctctatctgtatgacagtgttctgatgctggccaacgcctttcacaggaagctggaggaccggaagtggcatagcatggcgagcctcaactgcatacggaaatccactaagccatggaatggtgggaggtccatgctggataccatcaaaaagggccacatcactggcctcactggggtgatggagtttcgggaggacagttcgaatccctatgtccagtttgaaatccttggcactacctatagtgagacttttggcaaagacatgcgcaagttggcgacatgggactcagagaagggcttgaatggcagcttgcaagagaggcccatgggcagccgcctccaaggattgactcttaaagtggtgactgtcttggaagagcctttcgtgatggtggctgagaacatcctaggacagcccaagcgctacaaagggttctccatagatgtcctggatgcactggccaaggctctgggctttaaatatgagatttaccaagcccctgatggcaggtacggtcaccagctccataacacctcctggaacgggatgatcggggagctcatcagcaagagagcagacttggccatctctgccatcaccatcaccccagagagggagagcgttgtggacttcagcaagcggtacatggactattcagtggggattctaattaagaagcccgaggagaaaatcagcatcttctccctctttgctccatttgatttcgctgtgtgggcctgcattgcagcagccatccctgtggttggtgtgctgatatttgtgttgaacaggatacaggctgtgagggctcagagtgctgcccagcccaggccgtcagcttctgccactctgcacagcgccatctggattgtctatggagccttcgtacagcaaggtggcgaatcttccgtgaactccatggccatgcgcatcgtgatgggcagctggtggctcttcacgctcattgtgtgctcctcctacacagccaaccttgctgccttcctcacagtgtccaggatggacaaccccataaggactttccaggacctgtccaaacaagtggaaatgtcttatggcactgtccgggattctgctgtatatgagtacttccgagccaagggcaccaaccccctggagcaggacagcacgtttgctgaactctggcggaccatcagcaagaacggaggggctgacaactgcgtgtccagtccttcagaaggcatcaggaaggcaaagaaggggaactacgccttcctgtgggatgtggccgtggtggaatacgcagccctgacggatgacgactgctcggtgactgtcatcggcaacagcatcagcagcaagggttacgggattgccctgcagcatggcagcccctacagggacctcttctcccagaggatcctggagctgcaggacacaggggacctggatgtgctgaagcagaagtggtggccgcacatgggccgctgtgacctcaccagccatgccagcgcccaggccgacggcaaatccctcaagctgcacagcttcgccggggtcttctgcatcctggccattggcctgctcctggcctgcctggtggctgccctggagttgtggtggaacagcaaccggtgccaccaggagacccccaaggaggacaaagaagtgaacttggagcaggtccaccggcgcatgaacagcctcatggatgaagacattgctcacaagcagatttccccagcgtcgattgagctctcggccctggagatggggggcctggctcccacccagaccttggagccgacacgggagtaccagaacacccagctctcggtcagcacctttctgccagagcagagcagccatggcaccagccggacactctcatcagggcccagcagcaacctgccgctgccgctgagcagctcggcgaccatgccctccatgcagtgcaaacacaggtcacccaacggggggctgttccggcagagcccggtgaagacccccatccccatgtccttccagcccgtgcctggaggcgtccttccagaggctctggacacctcccacgggacctccatcagagctttttaatacaagaaaacaacaacacaaaccacacacactcgcacacacacacatacacagagactctttcatttttcttgtacatatgtgtaaataatgacagaatggagtggggtaaaagtgtattttgaatattcccaattttcgaagtcagtaaaaaaacacaaaaactgtatgaatgactttgtaaattttgttctatatgaataaaaaggcaaattacttgtgatcattctgaagtgccaaaggagcccccccattcctgggcctttctgagggcaggaggggcgaccagataaggagcccctctctgctgggggagaagggaagacgaggaaccccacatgccactcgctgccttgtcccacagcttgctgccccatttctttgctcctggcacctcgtcccttttagtccctcagcttgataaagagtgagtttggagcccgcattgggctggcccactgggttgctgtgctgtagggtgatcggctgttctgggtagcctggggctgaggaggtgccctggactcagggctatcctgtcctgtcttggatcttgcgggacgagttagtcaccgctgtgtgtgttgcagtgtgcctctgccccatgggcccgagagaagctgacaattacccatagtgaggtaattgagggctttgatactgagctgttctcatatcatactgttggccttgtttttcattttcttttcaaaattagaagaatcaaaaagtgatagaatattgggggaaggagggcagactccatcgtttcctcagggagactgggcggaggtggggttggtctggaagaaggtccatgggggcagggagttgcgaggtggggttagttgcatggaccaggtgaggtggtggaacaaaaggccaggtagaggaagaatattcccttgggtttggacccatggtcccaggtgagagaaggaagtgaggccatagatgcagggagtagaagctttgtggtgtcaggcaaacggactctgttagtaagagttgggggaggtgcccaggtgggtggaccagtactccaggtgatggggcatgctgagaaatagagaaaagagaccatgtttatttgggtaggaggaagccttgccttgcgccttaggtgagaagcataagtgtaactcccatccaccagggaagttgcttgtagccccaaaagtaaaggcctatctctgggtcataaatcctgcaggcagtccaacaaacagggctggctccagcacaaactctcccttccacctttacgaccctctccagaccagacctggagtcctcttcaagcagcaatccaacccagagcaggggccctccccactcaggcatctgataacctctgagatttccaggcctatccctgtgcaggtacagctgcagggaagcccagttttctaagcctaggaccacctaacagcgccccctccttcagttgccctttctgaggcaactaaactacagaatcagggaaagaaccattaggagtggaactgggggaatctgagttgtgtcacttcagttcctctcctaaagacaaaggttagtctgatctccagacccgtcagaatggaatacacagcccacatctgtcactgaaggaggtggagctcccacagccagcagtaatcagggagctgagagcctggttctgtgatcatggagaaatacaaagtcctattgattgcttcttctatagccttgtagagtttctagagagatgtatttatgagggtgataactagcccaggattgatttctttcctaaagtccctagtgacatgattgagcagtaaagaacggccaaatcacacagtcagctaaaagcactgtggggaagagagtgtttataattatgttatttattgctggatgctgagaatggtctgatattcgtgctacctaggcaatccattgacatttctccaatcagagcatgtggaccttggagccaggcatgctcagagaagcctaggtgggctaccatgaccccgaggaagagcaggctttgttttccatcagcacgttgggggccctgccctgaatggtcaatttttcacatatatatctctctatttttttaatcaaactctggtctcactgccttatctcacaccaactctgtttcctcattgccccctgagatggcctgtcttctggggtatagcttggatgtcttcttggatggttctgcttagaatgagtgtcaaggaggaaagagagggagatggaggatgtgtttgtgcgcctgtgtgtgtgtgtttgtgtgtgtgtgtgtgtgtgtgagagagagagagagagagagagagagaccagcatcttcaagagaagtattctgcttatacaaaatccttaacacctcatggtgttattcttcaccatgtttatatatatatatatatatttttttttttttttagaattttctacccttggcatgaggggaaatgattgatattcaagcaagttctctaggaaaaaaaaaaacttcccaactcagatttctgtgtcagctcagaatgtatctttttttcatgctttgctctttggatttataactctgtttagactattccatacattttaggtatattttgtgccttcagacactgcaaataataatcagcatttggattaaagttgtttaataata

SEQ ID NO: 8 - protein, 1010 aa, Homo sapiens
MEALTLWLLPWICQCVSVRADSIIHIGAIFEENAAKDDRVFQLAVSDLSLNDDILQSEKITYSIKVIEANNPFQAVQEACDLMTQGILALVTSTGCASANALQSLTDAMHIPHLFVQRNPGGSPRTACHLNPSPDGEAYTLASRPPVRLNDVMLRLVTELRWQKFVMFYDSEYDIRGLQSFLDQASRLGLDVSLQKVDKNISHVFTSLFTTMKTEELNRYRDTLRRAILLLSPQGAHSFINEFSLQAVETNLASKDSHWVFVNEEISDPEILDLVHSALGRMTVVRQIFPSAKDNQKCTRNNHRISSLLCDPQEGYLQMLQISNLYLYDSVLMLANAFHRKLEDRKWHSMASLNCIRKSTKPWNGGRSMLDTIKKGHITGLTGVMEFREDSSNPYVQFEILGTTYSETFGKDMRKLATWDSEKQGSLQERPMGSRLQGLTLKVVTVLEEPFVMVAENILGQPKRYKGFSIDVLDAKALGFKYEIYQAPDGRYGHQLHNTSWNGMIGELISKRADLAISAITITPERESVVDFSKRYMDYSVGILIKKPEEKISIFSLFAPFDFAVWACIAAAIPVVGVLIFVLNRIQAVRAQSAAQPRPSASATLHSAIWIVYGAFVQQGGESSVNSMAMRIVMGSWWLFTLIVCSSYTANLAAFLTVSRMDNPIRTFQDLSKQVEMSYGTVRDSAVYEYFRAKGTNPLEQDSTFAELWRTISKNGGADNCVSSPSEGIRKAKKGNYAFLWDVAVVEYAALTDDDCSVTVIGNSISSKGYGIALQHGSPYRDLFSQRILQDTGDLDVLKQKWWPHMGRCDLTSHASAQADGKSLKLHSFAGVFCILAIGLLLACLVAALELWWNSNRCHQETPKEDKEVNLEQVHRRMNSLMDEDIAHKQISPASIELSALEMGGLAPTQTLEPTREYQNTQLSVSTFLPEQSSHGTSRTLSSGPSSNLPLPLSSSATMPSMQCKHRSPNGGLFRQSPVKTPIPMSFQPVPGGVLPEALDTSHGTSIRAF

SEQ ID NO: 9 - DNA, 6138 bp, Homo sapiens
gggggcgtcctccgcagttcgctcctcgccggggctcagacacacagccagcccagagccgccacgccggcccggccgccgccgccaccgcctcagcctcccccgaagccgctctagccgcgggaagcgccgctgccacagccgcgggccgcccccgccgcgccggcctgggctcaagctgccagcaccgccgcagccgccaccggagccggagcgggagcccgaccgcgctgggctgggctgggctgggctggggcgggcgcagggcgcaggggcgggcgcgcgggggaagacgcacgggcgggctcggctctcccggggagcggcccgggactgcaccgggaccagcgcctccccgcttcgcgctgccctcggcctcgccccgggcccgggtggatgagccgcgcgcccgggggacatggaagcgctgacgctgtggcttctcccctggatatgccagtgcgtgtcggtgcgggccgactccatcatccacatcggtgccatcttcgaggagaacgcggccaaggacgacagggtgttccagttggcggtatccgacctgagcctcaacgatgacatcctgcagagcgagaagatcacctactccatcaaggtcatcgaggccaacaacccattccaggctgtgcaggaaggtgacctgtgacctcatgacccaggggattttggccttggtcacgtccactggctgtgcatctgccaatgccctgcagtccctcacggatgccatgcacatcccacacctctttgtccagcgcaacccgggagggtcgccacgcaccgcatgccacctgaaccccagccccgatggtgaggcctacacactggcttcgagaccacccgtccgcctcaatgatgtcatgctcaggctggtgacggagctgcgctggcagaagttcgtcatgttctacgacagcgagtatgatatccgtgggcttcaaagctttctggaccaggcctcgcggctgggccttgacgtctctttacaaaaggtggacaagaacattagccacgtattcaccagcctcttcaccacgatgaagacagaggagctgaatcgctaccgggacacgcttcgccgcgccatcctgctgctcagcccacagggagcccactccttcatcaacgagttctctctgcaggccgtggagaccaacctggcttccaaggacagccactgggtctttgtgaatgaggaaatcagtgacccggagatcctggatctggtccatagtgcccttggaaggatgaccgtggtccggcaaatctttccgtctgcaaaggacaatcagaaatgcacgaggaacaaccaccgcatctcctccctgctctgcgacccccaggaaggctacctccagatgctgcagatctccaacctctatctgtatgacagtgttctgatgctggccaacgcctttcacaggaagctggaggaccggaagtggcatagcatggcgagcctcaactgcatacggaaatccactaagccatggaatggtgggaggtccatgctggataccatcaaaaagggccacatcactggcctcactggggtgatggagtttcgggaggacagttcgaatccctatgtccagtttgaaatccttggcactacctatagtgagacttttggcaaagacatgcgcaagttggcgacatgggactcagagaagggcttgaatggcagcttgcaagagaggcccatgggcagccgcctccaaggattgactcttaaagtggtgactgtcttggaagagcctttcgtgatggtggctgagaacatcctaggacagcccaagcgctacaaagggttctccatagatgtcctggatgcactggccaaggctctgggctttaaatatgagatttaccaagcccctgatggcaggtacggtcaccagctccataacacctcctggaacgggatgatcggggagctcatcagcaagagagcagacttggccatctctgccatcaccatcaccccagagagggagagcgttgtggacttcagcaagcggtacatggactattcagtggggattctaattaagaagcccgaggagaaaatcagcatcttctccctctttgctccatttgatttcgctgtgtgggcctgcattgcagcagccatccctgtggttggtgtgctgatatttgtgttgaacaggatacaggctgtgagggctcagagtgctgcccagcccaggccgtcagcttctgccactctgcacagcgccatctggattgtctatggagccttcgtacagcaaggtggcgaatcttccgtgaactccatggccatgcgcatcgtgatgggcagctggtggctcttcacgctcattgtgtgctcctcctacacagccaaccttgctgccttcctcacagtgtccaggatggacaaccccataaggactttccaggacctgtccaaacaagtggaaatgtcttatggcactgtccgggattctgctgtatatgagtacttccgagccaagggcaccaaccccctggagcaggacagcacgtttgctgaactctggcggaccatcagcaagaacggaggggctgacaactgcgtgtccagtccttcagaaggcatcaggaaggcaaagaaggggaactacgccttcctgtgggatgtggccgtggtggaatacgcagccctgacggatgacgactgctcggtgactgtcatcggcaacagcatcagcagcaagggttacgggattgccctgcagcatggcagcccctacagggacctcttctcccagaggatcctggagctgcaggacacaggggacctggatgtgctgaagcagaagtggtggccgcacatgggccgctgtgacctcaccagccatgccagcgcccaggccgacggcaaatccctcaagctgcacagcttcgccggggtcttctgcatcctggccattggcctgctcctggcctgcctggtggctgccctggagttgtggtggaacagcaaccggtgccaccaggagacccccaaggaggacaaagaagtgaacttggagcaggtccaccggcgcatgaacagcctcatggatgaagacattgctcacaagcagatttccccagcgtcgattgagctctcggccctggagatggggggcctggctcccacccagaccttggagccgacacgggagtaccagaacacccagctctcggtcagcacctttctgccagagcagagcagccatggcaccagccggacactctcatcagggcccagcagcaacctgccgctgccgctgagcagctcggcgaccatgccctccatgcagtgcaaacacaggtcacccaacggggggctgttccggcagagcccggtgaagacccccatccccatgtccttccagcccgtgcctggaggcgtccttccagaggctctggacacctcccacgggacctccatcagagctttttaatacaagaaaacaacaacacaaaccacacacactcgcacacacacacatacacagagactctttcatttttcttgtacatatgtgtaaataatgacagaatggagtggggtaaaagtgtattttgaatattcccaattttcgaagtcagtaaaaaaacacaaaaactgtatgaatgactttgtaaattttgttctatatgaataaaaaggcaaattacttgtgatcattctgaagtgccaaaggagcccccccattcctgggcctttctgagggcaggaggggcgaccagataaggagcccctctctgctgggggagaagggaagacgaggaaccccacatgccactcgctgccttgtcccacagcttgctgccccatttctttgctcctggcacctcgtcccttttagtccctcagcttgataaagagtgagtttggagcccgcattgggctggcccactgggttgctgtgctgtagggtgatcggctgttctgggtagcctggggctgaggaggtgccctggactcagggctatcctgtcctgtcttggatcttgcgggacgagttagtcaccgctgtgtgtgttgcagtgtgcctctgccccatgggcccgagagaagctgacaattacccatagtgaggtaattgagggctttgatactgagctgttctcatatcatactgttggccttgtttttcattttcttttcaaaattagaagaatcaaaaagtgatagaatattgggggaaggagggcagactccatcgtttcctcagggagactgggcggaggtggggttggtctggaagaaggtccatgggggcagggagttgcgaggtggggttagttgcatggaccaggtgaggtggtggaacaaaaggccaggtagaggaagaatattcccttgggtttggacccatggtcccaggtgagagaaggaagtgaggccatagatgcagggagtagaagctttgtggtgtcaggcaaacggactctgttagtaagagttgggggaggtgcccaggtgggtggaccagtactccaggtgatggggcatgctgagaaatagagaaaagagaccatgtttatttgggtaggaggaagccttgccttgcgccttaggtgagaagcataagtgtaactcccatccaccagggaagttgcttgtagccccaaaagtaaaggcctatctctgggtcataaatcctgcaggcagtccaacaaacagggctggctccagcacaaactctcccttccacctttacgaccctctccagaccagacctggagtcctcttcaagcagcaatccaacccagagcaggggccctccccactcaggcatctgataacctctgagatttccaggcctatccctgtgcaggtacagctgcagggaagcccagttttctaagcctaggaccacctaacagcgccccctccttcagttgccctttctgaggcaactaaactacagaatcagggaaagaaccattaggagtggaactgggggaatctgagttgtgtcacttcagttcctctcctaaagacaaaggttagtctgatctccagacccgtcagaatggaatacacagcccacatctgtcactgaaggaggtggagctcccacagccagcagtaatcagggagctgagagcctggttctgtgatcatggagaaatacaaagtcctattgattgcttcttctatagccttgtagagtttctagagagatgtatttatgagggtgataactagcccaggattgatttctttcctaaagtccctagtgacatgattgagcagtaaagaacggccaaatcacacagtcagctaaaagcactgtggggaagagagtgtttataattatgttatttattgctggatgctgagaatggtctgatattcgtgctacctaggcaatccattgacatttctccaatcagagcatgtggaccttggagccaggcatgctcagagaagcctaggtgggctaccatgaccccgaggaagagcaggctttgttttccatcagcacgttgggggccctgccctgaatggtcaatttttcacatatatatctctctatttttttaatcaaactctggtctcactgccttatctcacaccaactctgtttcctcattgccccctgagatggcctgtcttctggggtatagcttggatgtcttcttggatggttctgcttagaatgagtgtcaaggaggaaagagagggagatggaggatgtgtttgtgcgcctgtgtgtgtgtgtttgtgtgtgtgtgtgtgtgtgtgagagagagagagagagagagagagagaccagcatcttcaagagaagtattctgcttatacaaaatccttaacacctcatggtgttattcttcaccatgtttatatatatatatatatatttttttttttttttagaattttctacccttggcatgaggggaaatgattgatattcaagcaagttctctaggaaaaaaaaaaacttcccaactcagatttctgtgtcagctcagaatgtatctttttttcatgctttgctctttggatttataactctgtttagactattccatacattttaggtatattttgtgccttcagacactgcaaataataatcagcatttggattaaagttgtttaataata

SEQ ID NO: 10 - protein, 960 aa, Homo sapiens
MTSCRARRSPTPSRSSRPTTHSRLCRKVTCDLMTQGILALVTSTGCASANALQSLTDAMHIPHLFVQRNPGGSPRTACHLNPSPDGEAYTLASRPPVRLNDVMLRLVTELRWQKFVMFYDSEYDIRGLQSFLDQASRLGLDVSLQKVDKNISHVFTSLFTTMKTEELNRYRDTLRRAILLLSPQGAHSFINEFSLQAVETNLASKDSHWVFVNEEISDPEILDLVHSALGRMTVVRQIFPSAKDNQKCTRNNHRISSLLCDPQEGYLQMLQISNLYLYDSVLMLANAFHRKLEDRKWHSMASLNCIRKSTKPWNGGRSMLDTIKKGHITGLTGVMEFREDSSNPYVQFEILGTTYSETFGKDMRKLATWDSEKQGSLQERPMGSRLQGLTLKVVTVLEEPFVMVAENILGQPKRYKGFSIDVLDAKALGFKYEIYQAPDGRYGHQLHNTSWNGMIGELISKRADLAISAITITPERESVVDFSKRYMDYSVGILIKKPEEKISIFSLFAPFDFAVWACIAAAIPVVGVLIFVLNRIQAVRAQSAAQPRPSASATLHSAIWIVYGAFVQQGGESSVNSMAMRIVMGSWWLFTLIVCSSYTANLAAFLTVSRMDNPIRTFQDLSKQVEMSYGTVRDSAVYEYFRAKGTNPLEQDSTFAELWRTISKNGGADNCVSSPSEGIRKAKKGNYAFLWDVAVVEYAALTDDDCSVTVIGNSISSKGYGIALQHGSPYRDLFSQRILQDTGDLDVLKQKWWPHMGRCDLTSHASAQADGKSLKLHSFAGVFCILAIGLLLACLVAALELWWNSNRCHQETPKEDKEVNLEQVHRRMNSLMDEDIAHKQISPASIELSALEMGGLAPTQTLEPTREYQNTQLSVSTFLPEQSSHGTSRTLSSGPSSNLPLPLSSSATMPSMQCKHRSPNGGLFRQSPVKTPIPMSFQPVPGGVLPEALDTSHGTSIRAF

SEQ ID NO: 11 - DNA, 112418 bp, Mus musculus
  misc_feature (1)...(112418): n = A,T,C or G
acttggcagagaggtgaagtgcacatcacaggagctaccccctccccaagggggtgagcacacctggcctcctctgaggctgttgatggcaaggaggggcagggctttccatgtccaatgctgaagctattgggatccccatagcacaggcagaatataagacggaaatgcgaagtggggtaggacagtggaacagttggggacctctcaagtctagactgagggtctcgggtgacctggctggaggccctgccttccttgcaggtacagtccatgggatgatgtcatttctgatgacagcatcctgcgtgtgcgccagaaacagacacaaacaggctccgggcagccaaggttaatccttctgcccggctgtgaaagtcagtgctggtgaaacttgggttcagcgttaactttggcgaacggaatagacacatggtttcctttaaaaaggagagtgacgcgagtcaaaagcacagcctgacttttccagctccaggaagacgtgggtaaaactcttgagctcttttgactagctctcacaaaaaaacactctgaattcagagggaaagcaggagggcaggccaccccccccccccccgggcaggggtgtggtgtctgtggctccaaaaggagctggcttcccaatcttgagaaagatgttcaccgttgctatggctcagcttcctcctctcgagatcagggataatccatgcctgcctcacaaggtgagagagacaagaacagagctcagtctgtgaacgtcctgagcagcatggacataacagggtgaccacgcgaagcctcaggagtagctctcctaggtgctccagcaactatcacagatttctgggctcttgggtagaagcggtagcggtatcctctataccagggagcaggcttccattcaaatggctcttcttggaaaatgaccttgtggatggggagtctgctccagcaagcactgctgtggtactcagtgttgtgtaggaacatcttagctcttactcacgttctgtctctggctatatctccttcactgaggtttccttggcaacagactctgaggcagagctgtgagagtgggaattaccctgcagagagctataggtacagcacctatgagggaaatggcttacaacagggtagatagcaggacagtgatggagttgcagcattggatctggctggtctagctgttcctggagagcttggtcctgttgcaatgataaagcactgcgtggggctgctcccaaggctggagcatcatcatgggtaaggcagcttcaggactctgagaaaagctagaagagttcagctgtggtttgtcccgagcaaccttgtgttggctatggaaatggatgtcttaatatggggtaaggaaatgagtgacagccactcagcagatctgagtgaatgcctgttcctcttcaagtttacctctccagaagtttgagcattagcaatatggccacctgtccagtgggagtcttacagagcaatgtaatcttggataagttcttgtccattacagaactcagagtccccaagggcaaaatggttagataggagatggactagagacccgaggaaccattctggtggaactattgtacaagtgtagatgcaagtgaccatgctggttgcttgtatctgtccaggtctcaggactgcaaccatcttaatttcttctgctagaaaatagaatctcaggcccttgggggcatccctgtgaatggagcagattctgggccaagagtactggatggtgtcagggggtcagcctgcaaggcaaaccccagctctgcacagggctggaggcaagagggcctagcactggcaactcctgctgtgcactttctctgctccagggaagaagttccgctgtatgagacactgtgtatccctttaatagttcagagcgttgtaaagtttccagagacaagtatgggtgcagcagtgtttgcttgtttttctgtgacacagcttgtaatgttcattctattgcattgtagcttacattatttaaataattatgcattggaaagttgtattagcaaaaccagaaaatagtagatgtgttgaaaataattaattggtacataaagtaataaagtatacatttagggtaccactattgaaaataagcaggaaggcgtagaacatgaattatcaggagaatgttgccattgcggttttcttgattagactgcaggcttatatatatatgcaagttttaattttctttagcttttaaagttagtataaaatgtaacaggtttaattatgcattttcctatacgcaccacactatactttgttctatgtcacgcccagtgaaatcactttcttcaagcacttgggattcatttgtagcacattgcttgtctagagtgttctatgcttcaggcactgtgctgggtgttcagcatcacatgttacatgctaaataaacaacaaagccacgaagctaggggcctccaagaggctctggttgggaaaaaccaacctaatctgctggcttagaatggacttctgggaggaagtcgtgtttgagctgtttttgtttgtgtgtttggttggttttggttttgttttctattcaggatgtgtgggtgttaagacagggtaggatctgttatgcgggtgcattgtcagcaggaaatttgcttaagacatggggtgagaggatcaagagattgagaccaacttatgctatacttttccaggtgggtgtggttatgcacacctgtaatcttagtacctaggagactgaagcaggaggattgttgtgagtttgatgataggctggggggggtaaaaagtgagttcaaagccagcttagtctagatagggagatcctgtttgaataagcagtattaccatcactacacaggtcagggagaggggtggaaatgcagattctgggccaagagtactggatggtgtcaggctaaggaaagaaagtggcttcagacctcccctctgcacctagccactgtacaggagaacatttttgctaatgaagcaaggttcttcctgtcatcaggcaactgtctctgtcctggtcccaagtatggatgttgttacgaggtttccctgtgcctctggagcatcctttgtaaggtcaatcccctcttcccctcctcctcctctttctcctcctcctcttccacctgagtgtgttcagcagaaacaactagtaatggcttccccaggcagagcttcccctcccttccccagtctgccagggcaatgcacttgtttctgtttgagaagtgagctaaacgcaggcactgggagtttcagcagatggccatgaagaggaactaacatttgaatcctggtcagagtgttccatgtattgaaaaatcatgtatcaatatgctatactgttgcttgaaaatagcattcaatcatatacacaagtatagatatatatgcaaacacacatacacacactcacacatgcacacacacatacatgtacacacacacacacacacacagatttgcacacaggtgcttctgcttgactttgagtctagataactacttagttcctataaaggtactaaaaccttcagctttgatggacaaaaaataccctgtgccaggagctgttttataacttcctataatgattctctactttgccttcaattttgtgttttccaaaacagacttatgaagggttttaagcatacagagaggcagaaagcactctacttactgctcagtcagtgttctatcgctgagaaaagacaccatgaccacagcaactcttataacagaaagcatttgattgggccaggcttacagtttcagagggttggtccattttcattatggcaagaagcatggaggcatgcagacaggtgctggagcagtagctgagagctgcatcatgacacatggggggggggagagagacagagacatacagagagagggagggagagggagagacagagagggagagggaaagggagagagagaggaaaagggagagggagagggagagatagagcagagagggagagggagagactgagtcagggatagccatagagagacaaagagacagaaagagagagacagaggttaggagtggcatgggcttttgaaccctcaaaactcaccaccagagactcatttcctccaacaagtccacacctcctaaccctttcaaatagtgccacaccctggtgaccaaatccatgagcacatgcagccattctcactgaagtcaccacacaaaccgtgcctgtatccagtagttacattagatttgtgtcatcttcccttcattgtgtctgccaatctcttagccctgctttccttccatgctccacctttttgtatttgcatgtacgtcaggttatcactgagccagagggactggagcttcctcagtctctgtcagtttacagagagtgagacacacacaccacgtcttaagccaatgcttagtgtgctttgagaagtgcatttctgtgagacacactgctagggagtgctggactgcagatgtggctcagttgctcagtcggtggagcacccctccagcatgcacaaggctctaggtttgatctccagctccccttaaatcagtcaaggtgccgcagtcctataatcctagcacttgggaggtggatgcaggaagatcagttcactgtcctccttggtgacattgtgaatttgaagctagctggagatgtgagaccctgtgcaaatcccccatcccaaatgcaaggaagtttttgtatgcactttcaatttgctgggcggtcaaataaggtgctgctaaatttaaaggcctatttacataaaatgtagcatctgcttcaatgcctcttagctctggaggcagagtccttacctgtaattggtaggcagggctcacagtgggtatcagtggaagtcagattctgcagctccaggcagcttcaagtgggaggtcactctcaactaaagctgctaaagggaagttatagagagaatggcccaggctgggtgagggttgtatctctttggtaaaatagtgggatgagaagggcagactgggtcagggaagaagaagcaggcgcatcatgggatccagtcagggatgatgaacgaactacatagaggctctaagaatatccacgtctctcccagggcctcctggggactcagtacatcttgagcaggagctgggtttccatctgcctccccgaggcttccctgtgcttcttgatgcagcccagcctggccctggccccagccctggaggcaaagagctgcttttactggaaagtgtacccagagccctctctcagagggctgcaggcagtgttggtggacaagctttcaactgtctgagtgattccgtaacaaagagggagagggtccagttacagcctgctgtggctgctgtgccctgctggtccctcctcttctctttggagggcaaatggggcactgcagtagcttggggcctagaagcaaagctggtatttaagctgctagcatgtcagcagacactcttcaggccttgttacaacaacccatttgcaaaagaggatctggcattcagaagggagaatggcttgtcgttggtcacgcaagcagtgcacagcagagccgaggacacaggcttctgaactctcagagccagtgttgtgttcttcggtgcttctgcctcctgttgccaggactgtgagcacttgagcccagactgatacaaggttcgcctcctatttgcctgtctgtgtccatgtctatggatctgacctcagcattcctctctctccttcctccccatctttttttcctctttttcttcctcctcttctcccttcatctaacagcatgctgtttgtgccaggcctggctactgagggagatgcgagccacagtgcctggcatagggaagtcacagttactgcatgaagaagacacacagatgaaaaagacaggcatgaagtgctttgatggaagggtagctctaaattcagtgatgtaattgcccagttcatgtcaggagaggcttcctggaggaggtgactgaggcaaaacttggaaaacatacaagtttgctgggaaacagtagctggcaagtctctctctgtcaaggggcggggtgggggtgggtaggggtgggtcatgctgaccctgggaggtggaggaagtaaggcacatctgtaggagacaagcctctgaccttggcagagtttgaacatttttacaaaccaagtcagtcaataacaaatgaggaaaagaaaggatttcttcatcttttaaatgttgttttctgatatgaggcaggaggcagcgttcctcagatagttgtgtgggcagagagagtggggctagttaccgcctggcacggctgggcacagccctccttagattccttctcactctgaaatgacatcccaggacccaaaccccaccctttggaacacctctgatactcttaaaaaactggaaaagatgaggggttcagccagctcccctagtttggagccttcagggccgagtagtgttctagttcctgtcagggctgggctgggtggggcgccaagctttctcaccctgtatgaccgccagttaagaactggcttttcatttctttttccaggtggaggggctggcggggtgctggtgcttagtaaaccaccctagtcttgtccctaaaatagcactatccaggctaggaccactccctccagctttgtgttaaccctttccaaacctgttcaacagatgggatgtggcacaggcagaaatctctagcagctcagcctggcaaattgcacttcttcaagtcatgttaaaagggcagggccatccagatgatgcagtgttaacatctggcctcagcatcctgctgggtcctcctaagggcaagggtaggaactgttgcatctgccaaaggctaactaagctacaggcactaggctggccattctcatcatgacactgcatctgtgctgtggaaactgtcaccacccttcaggttctgcatctccagattgcctttgtgctgtggctcttaaataagcccaggactaatggtctcatagctaaactctgttcccttgagggggataatgctcccccttttcccagtccaaggccttgaaaggctgggagtgaagtgtacgttttgaaagtgcaatttaacctgagtctaatcacatgagttagatgtaagggctctttgtaaaccgtaaagtacaaacaaatgtggaaagccattatgaggcatccgtggtttatttattcactcagttacgtgttgactcattctgtaaatgtttatggagcccttatgtggggctggctcatttggaggaccctgtggtgaacaaagcagatggggtccctgtctgagggattgtattctagatggggcctatggatggttcgcaggcactcatataggctaataggtcaccctctgatggtggaaggtctcccaaaggaaataaacaaggatgaggctgtagagtagaagagcatgtgtggggcgtcattgagattgagtggacaggacaggctgtatttaggatggagccagcctcagaaagagttgaaaagggaactttcttggatcagggagtggctgcagaaacacggacctggcatgtgggagaactaattcaaaggccaaggtgactggaattcagtgagcaagaggtttgcagggaaaggtataatagcaagaagtgcaaggaacacaggcttcttcctaccaccaggcattcctggggctgttagcatgtgccccatgtcacgctctctcagtaacaccctaccccttcgagtttctgattttgcttcttagagcaagcatgggaggttgaactcacagaattcagctgctgagttctaaccaggacagagatctcctggctgtctcctctctgccttcttcgggcagccatgaggcctatgggctgctggagggagggtcagtcttcctccgtacgatggagtttctagtttgaagtgtagctcatgcaaacaagtcagtgggggatcagtcagggttctgactatacttgggaatgagtctgtctcaagagaaaatggattacctgagaattgagggagatgaaaaaaactaagacccaggccagataataggaagggtttggctctggcgcaaagggctccaggatcctcctgaggtctagggtacggattcttcaacttttctgccagagggaagtagccacagtgaacaacgcccattgcagccccagttacactgttttcataacttcaagagacactgtggattagcagaaccaacagtgctgaccaatgcccccagccccaagcacttcagaaattcctgcaccttcccccagacttagtcccacaatagggggctgtccccatgcctgctgacaaaggcgactttatgtctgattgccctcccaagatgtctcttgtgaccaccctggttgcctagcagtggatgggcttccacagtagtcttgtatggaatgccacgggcatcctacagcttacccccacacccttactaatgcataggacccggaacatttggtagagtgtcaaaaaacatgccagagaggccacagaggctgtgctcagaagaggagtatgggacattctcttgggcagatgttttagatgtcaccttgagatctcaggttctctgaatggatgagagggagaaagacatgttggtcacatgataataagcactcaggaaggtcatgttttctttttcttttaaaaaattatttatttatttatttatttataatttatgtgagtacactgtagatgtcgtcagacataccagaagggggcatcggatcccattacagatggttgtgagccatcatgtggtttctggaaatttgaactcaggacctctggaagagcagtcagtgctcttaactgctgagccatctcttcagcccatggtcatgtttcttaagactggttttcaatgtgcgtcatggaagttaagtaattgcttgtaagtggagcatggtcagtatcatgtagaatacctacagagctaactatgtcttctggaaggtagggctggggcccaagaattcctacagtcagttcatctgttaggggatatctggcacaagaagtcaggaacaccttgtttagagcccccatgtggtatttgtcagccatgatcttggagaaagtttcttgaccttgcttatctaatgcgggctgtggctcacggtcaccaaggacagcagagagtgaggagaggtgcactgagcttttgagtggtgattttgtgacacggttatgacagcacctagttgcgggtaggatcatgtgatgttattttttttcttgttaattttcggttttgtttgttcatttttcttccagtgctggggaatctaactcaaagtcttgtacactctaggcaagtgcatggacatggcactaccatttctttttttaaaaattttgtcttgagacaaggtcttgcttagctgcctaaactggccttgaacttgtgaatgtcctgtctcaacctcttgagtaataggggactcaggtgcatggccatcagaactgttgccacatttatggaaaactcctgacaggtgtcaatcaatctctggtctataaccctcttttctttctaattatactttggctacctgtgaatgcccaggacactgagggacagagaaggagtctcactgtgttttggaaagggcatgcccagatggcggactttattctgaggctcagctttcagccctaccgtccctgtttggggtaaggctttcatggggagatgtcagatggctctagctgggagtattcacacaaatctgtgccaggttggactcacttagccagagtcacctgtccagagcaggtggcagcatctgacagggtgtgccatccctctgagctggcatgtgactcagggctggcctcagtgtgacagaggagtattccccatttagtccaatcagggcatggggtcctggtagtgcagattactgtgtgctctggcctctgcaattgcagagagaagcaaagacagtgacatcctgaagggctgtaccagcagggtcaggtgagtgaatggctcctcactcagtgtacagagccagcgatcgtttcctgtagatggaggctgagtcttctggcttgaatgtggagggatttggttgctaagatgtatgttttgtttggaggtggtcagggaaggctcagtggggagagttgtttgtagagtcaccatgttgaatgataggacttctccaatcgtggtgggtggttggatggtcttgctgtgagtctagtgtttctgactcctcacctggtcttgtccttattgccgtgagtgtggaagcagttgggaagaggaagggaggtaaaaggccttgggtacctggaggatgctttgttgacctggccagatgggcacaatgaatgggtacatctgacagctttggtggtgaggaaagagtcactggagcgagcatttggctccccgcgtctgcttttgaccaattcctgttctggttcctccctagaggtgctaatcctaccctctgcctcatagcgtgatttctccctgttgctggggactcaggtgaggaacatgagggtgaagagaagctctgaagccacagggtagcatctctccttctgctcttacttaggaaaattgtctctttccagctgagctaccctaaaacaatggctgcatcccggcagctagctgaagctgtgctggggcttcctggggcagcctggggtcactgccctctacattttttctcattctttcctcggctccttggaagaaggtcctcagacccctgttttctctctcctcttttgtcttgtggttacacagtggccaactcttctgagcccagcagggcacttcccttgcccaggaggtgccagagtacccttgtaccttgctgaagccccatccaggtatttattccttaatggggcatcttgcaccccctttcttaggcattcttctaaccccagatactctgctgatatcttctcacacactctcctggtgatctcgtggtgtggctccacgtgaatggtggggttcattcagctaaaatggggtgtatcctgggccttaagtgtagcctctgactccaggttttatgatcatcactgccccaagacacaccccaacaaacataaccaagtcatatgttcacagagtaaaaacgtaacagaagagcactcaggctggaaagatagctgtcaggtcggtaggcacttctcataaaagctggagttcaatagatggaacacatgtaaaggtggaatgagagaacccaatccacaaagctttcttctagcctccccatgtccatacttgcacacacacacacacacacacacacacacacacacacacacgcgcaaaaaaagcgattggctcacaattccctagagatttttaattcaaccaagaaaccactttagaattagtttctatgtactcattatgatggtttatatatgctcagcccagggagtggcactatcagaaggagtgactctgttggagtaggcatggcattatgggtgtgggctttaagaccctcatcctagctgcctgaaagtcagtattctgctagcagccttcagatgaagatgtagaactcccagctcctcctgtaccatgccagcctggacactgccatgatcccaccttgatgataatggattgaacctctgaacctgtaagccagtcccaattaaatgttgtccttataagagttgccttggtcatggtgtctgttcacagcagtgaaaccctaactaagacactcatatacaaagaactaaagcagatttattttaggagaaagccaaaagctgaggtcctgtcctcttgccaactctctccatccatgtcttctggatcccaccatgagagacccaagaacttgaaaaggtcgaggagccctttgaattgaatttgataagaacacagtgaggtcatatttctgaggggcatcttaaactttaataggctatggcattgctgttcactcttccacatccctaggctctacagccaccaatagatttgtctaaatcaaattcagaagggtcatgctacctacctgtgaccccttccaagtctctgctcatgggtaggtccttggtgagatgcttcaaagagttgcttcagccataactcaagtctctgctggaaaagttcctacactagaaaggtatctgtctgtgtctgtggtccccagtaggctgtgaagaaccgtgctttatcccatatggtccaggtgcctgaatcacagtgcatgatagaaactgattattgtgcgggttggggcacaccaacagtaattttagggatcaggaagatgcctcttcaagcacaagaacctgatttcagatcctcagtactcacgtaaaagtaggttccattttttatgtctatacgcttagtactgggcagcagagacagagagatcctggggctgcctggccagccaacctaagtgaaacagcaagattcaggtttagtgagagatcatgtcttaaaacaataaggtggctagccacagaagaaagacagctagtgttgacctcttacctccataagtgtgtgcacaggaaagtacactcacacacacacacacacacacacacacacacacacacacattttatcaggagaaggaattgtttgtgtctgcaatgcctattgagactggcaatatatttccatatgtgagatattcttcatcttaaacacagctctttgtcagcagccgcacagccccatacgtggggaacaaaaacccaaggcagtgaaaataaacaaatggctgcaagagtcccatgtttctgtttgggaggcgcttcgaatcagcaagggactccaagttctttcggatctctgttgaaatgaggacccatctatgtcagtcttgtaattagacaaggttgcctggtgtctgccagaaacatgaagaggtccctgcccaaaagagcacggagcagatggggttgctgagcgcagcttgtgcgtgagcatgccgcctggggaaaggaaggcagagaaccaggagctgtggtgcctgcgacactcgtccctgggggagagaattagatgccacagaagcagctcctagactactagctccctgcactgtgacccagatgtcaggatccatgcagaatagggattcttcatgggtcttgcaccgtgggggcagaagtgcatctgtaatggacaggtgcagcagctaggatgtggctgccctgctctgccagctggaggaggtcaccaccaatatgctctttggcacatctacaggcgcaccccgctgctgggatgtcaggcaacatcaccccgtcccctctgctcatggcatctcgtacctggccgggctaactgtaagtaactctgagccctttcctcacacttccctcagcataggaaaaagaccagcagggaacttagcccccaaaagtgacagaaaaatgtcggtcacaaccagagtcagctagctactcaagggcacatggagagagactcaggaaatctggggaaatgagaactccaagccatataccacaggacccggctggaagcatcaaaggaagcttcaggctcctggcttccaacatgactctcaagtagactggaaatcaatacagttaatgagaaattctcttttacatataaaatgaataggattcacaaatgtataagattcttcacaaaatcaatcttcttgcttgtatatgtgtatagaatgtgtatatatgtgtgtgttcccgtgtgaggacacacatgtgagtgggtgtctgtgtatgtgtgtgcttgtgcacgtgaaggtcaaaagttggtgtggggcaccttcctcaattggtcgctgaggcaggctcttcctccgatcatctgtttgactagtgtagttagctggtttgccctggggaatgccttggctcagcttcccaagtgccgaggttataggcaggctaccacacccactgtgcattcctgtgggtgctaaggtttgaaactctctatgctccttattcttaaaaggcgagtgctttacccctgtggcttctctctcccagtcatatattctaggaactttctagtggttttatttataacataataatggtattaatgtgatgctgtcttgctttagttatgtatgtttatttatgaattcataaacatttacttatctgtgtatcttatgtgtggttaatgatgtgtaccatgatataaaatgtaagctcaaactttgaatcagattataaaagcccaaaaagcagtattctagggcctcagtggggcagagaagagcgtaggtgtggccctgtagcctggagtatgcctgacttctctttggacacagtggctatctccctgctgtccaaggtaaggactcctggctcagtcagccatgagcactcctctctttttcttaccctatgctctcctaactggatgaatatatcctcaagctacagtaagggtcagaggtagttggctggtccagtctcacatgtctgtccatctccttttgttcctcatccctcaagggtggcttttgctacttccagccaaaccacacaagtccaggaatggtcatagcagttgctgaaggaggcaggggactgtcatatttactgcacaggtgatagctgggcaatatttttccaacactgaaaagtgtcaaaaggagataatgaagtatgtgtgtatgacatgggaggggacataggcgctgtcagcctctctctgaacatggggatagctcaagaaatacttataatacttactcatctcatatgccatcttacaaagtcggcctcaacgtatgccaacaaatagtgtccaagacacattcctatggctacaaaacaattaagctgggattttctaatttaaaaaaaaatcaagaaactaaaagatgtaaaattgaaaattagttgacaataaccatgatactcttgtaaagaacagagtttaactggatatcaaagcttcaattaatgaccttctgagtcaataagaaggctttgactgtgtctcagcaactgcttaggttttatgtgtctctctacataataaatatgtacaaaataaaacatgtacaaaataaaaaaaaccaaatgaactaactagttatataacaatagattgtggacaaagaaggctttggaggagacttaactttaagtaatagtgacaaagatggccagcatagtgacaataaccaactaacacagggctgagaacaaacttccatccttccatttgttatcataaactttatgagtagtagcctctattatcatcccatttgccaggtaacaaaattaagacacataaggcttcagtaggttttgaaggtcagactttggcttcttgagctcctccacaaagcatgttgccactccatgacacacggctatatttcagaaattggaatacttactatgtcttctagtcagcttagttccaacatttttttacttcaataaatgttctaagcactgaaaaatgttttaaataataatttttcaatttgtttagacttttctttgtaatatattttgattccactcactccccatatcccccagttcctcccagatccatccctaccttcttacccacttacttttgagtctttttaaaaaagcttatcaagttccatttgtgttgcccaagtctcttgagtatgaggccataccttggagtgtagttgacctaccagtggtcagattcttaaagtaaactggctttcttctcccagcagccatcaatagcttctcaagtgggagtgggagttcctgcccacattccccatccatgctgggatttttgtgtggtttgagcctatacaactgccaaagcatatctggaaatcactcttttgttgaaatctactgcttttggcctttacaatctttctatacactttgcacaatgacctctgagctttgtgggaagggagtgatatcagtgtgagggaagctggaacgctcccatcttttattctctgcacattgaaccgttgggtgtctccatggtaatcactgtctactgcaggaggaatcgtctctaacaaggagtgacagttgcaacgatctatgggcataatgataagtcactgaaagttggtttaatactaagtccattaagcagacaataatgtaagttctcccgttgggcctgtgacttgtctagccaaaggttttggtcccgataatattgccagatatgggtttcatcttttggaggaggacttagctctaacgagaaaatgtttgcttactcaaataactactattgcatgcgagggggtgttgtgtacctcacagggttcacagatgggcaatattgactattttcctttttggaagactgcatagcaacttctagcaccataaaagctagacagtggagataaaacctccaggtcagtaccacatgattaaaaagtagacgtggcattatatttttgtctcctaaaacacaactttatttttctaaatgtaatggtgagttgtggctgatatagagaaccaaacacagaaaatgagtatgtagacataaaaggtttctttacccccccaaagtgattactagctttcagtttatccataaaggtatgttttcttcataaattaaaattaagtttaggcaactcttttataatagttcttagcttttggtgacttcccaacattccaccatatctacacatgtagatcagtttcattcctattggctgtgtagcattcctcagaatgtgccattatctattagcatagtctctcactggggcacctttaggttgttcacagttatttacatttttctcattttccctcctttttctttctactatctttgtttctttcttagtttccttctttctttcttttgagacaaggtctctctgtagttctggatggcatgggacagagagcaggctggcttcaagcttacagagataagcctgcctttgcccccccgagtgctctgattaaaggtgtgtgtcactgtgcctatcccttcctctctttcttattaattcagataaccaagcaaggtaggtcatccttagctacgctcttgcttatcttattttgaatgtgtgtaaatccataaacttaacaaacagacaagtttaagtcctagtctgaattattcccctcggatctcctgggggttagcagagttatctgcatttcatgggtaacaaagccatacaagagttgcattgcttaatcctgcagggatgagtgttaggcccaccgttcagataaggctagctccagggtccagccttggatgttctagtcagataccctcttgtcattactgtaactacaagtttgctgtggctttatgcagatattcactcaagtgattctgcttggtgcctggaagtgggggagtcacaaagaactgagcctggggtagcccctccagagtaacagtggagaaatatgttttctggagcttttctagatttttcttaaagtgaattacatgttttacttgtgccatattggtattgcttactcaagaggaatcactaccctgtctggccctgtgcctttggacttaagtggtgttgagttatccaaagatgccccagcccaacctgtcccatagacttaggcccacttcccaggatgccaaaagttccgcacctgtctgagatataaaatattcaccctgggctctaaggtactttccagattctagaatgtctttctagatagttcttaagctcagatgtcagttcatgcggcttctttttactccgatgtcttatcactggagtcctccagtctgtggtcccaagtgggatggtattcctgtgtttgtgcaggtgtcagtgggaagggtctctgagatgcttttcagctattggtccatatgcaatgctcttgcaatgtgccaagcctcattgagtacagttggtttcctcagagatggagtagagtagaggaagaaaaatgatacgtgtaataatccaacactgtccgcttgactagcagggatactaaagcccagagatgctctatgccttcctagtcttatgtacagtgtatatagacacagagggtcagactcagctgtgggtcccttaattatattaaagatcttctctggggtggagaagggacacccaccttttcccttcatttcttatttctgaatcactttttagttcaagaccccaaaaatataccccctgggctggaacggccagacttcaaaactgcctttgaaataggacactgtgggagaatgcagaaactccaaaacacatttatcaaaggattcccctttcgccacatggtgatttacaatcctctccagttctgcagtcagtgaacgatgtttcacccagacccaagtgtgaggctgcagctttagtgaaggatttgcccaacacactggccacatgcagatgaggaaggggagtagggagatgatagaaagaacaagggacagaagaaggaagcagagagcagggaaacaggaaatggggactggggaagaaagagatgaaagaagagagaggaagtaagggaatacagaagagagggaaggaagacttgcagaccttgctgcctagcctgaagtctagaattttcttcaaggcctctaaagaaagcaagtgtcactgcttggcaatccttagcactgcactctatgtaaaggacagctcggctgtggtcaggtgtcgcaagcgactatgaggtcagtggtccccattccttttttccaggtaatctcctgcatgacaggaaaggtgactctatgtagcacctttgttctctggctgagagaaccaatcctattcaggtgtttggaggaacactgctcaggacttgggagagtggtttttccagtcctttgactttccctgggctaggaaggcaggaggttccctgaagatttccatagtgaagtcctgtatgtagggaacttcaggaacgtcttatgcagagcccaccagggacaaagaaaacttgtaagacactggcaaggaatcctggggctggggaccagataagagaaaagctattggtttgaactttcagagagggctgaggagggtgtgtgtgacatagctggctctcagcaccactggcatttggttgcagagagagcaatagccagttctaatgtctcgagcacaatcactaaaaccaagctgagccacgtgactgccatgctgtgttttcaattattccttctcccctctctgtctcttttggtgctaggcctagagggaagtccctttccacagaagtgaggctctggtctctccacctcagcccttgcattcctttcccattcatgttttctgggctgatgaggcttgcttagagcagtctctgctctcagaaggagggtgagtgccttgccctctgccttctccttcccactccatggtctatgtcatctctcaggagagcccagcctcagaaatgaccactccttgtagaagggcttgctttttatagctgacaggactcactggacacactcatggggtgagcagtctccaccaagaaatctgagcctcatctggtctaagacctgcatgcagccagtgtccccagccaagggagcctatggctttgcacctcaacctcaaaggaccccatagattctttgctctagaagatgcctaatgagtggctggtcatggctggggaacttgtaggtgaagagaggacatgggggagaaagggaatggggtatataatctgagggtctatggaaattggtagatcaagacattcagaaccagctgttatgagtgagaatggatggagggaaaggcaagcattggctggggtggaagtagcctagaaaacacactatctcctggaaatcattgttttccaggacttagactcctagtagtataccaaaagacttttattccaggaagatagatacacttttaagactaaacctgaaagttttgattcgtttaatggaataaacatcatagcgtcaggtatggttggatccagctgctgtgtgacagcatctaggcttggttctgctcacattcccctgaccttctgctccttgtgcttttctccacttctcaccccatctgcctgatgtctgtctgaacctaccatgtcaattttcctctccacacagtagtgcttagcaactcatccttagctcttcctcgtctggtttcagatactcctagaaggattttatcataaaacttatttgttttcaagctgtcaaatggctaatgtacaagttctggcacacacacacacacacacacacacacacacacacacacacacacacatcatgcacgtccaactgagtatgatctgaaaggaaggaggttcaaccaaagttatgatctacagagatgttgccacggagctgccagttctggggatttgacaggacagtgagttgaggacctcctgtgctggagacagcagccggagggcagccctgatggtttggatttgaaaggggatatctgaaagagaaacaagtaacaggaagaaaaaggcactgagaacccaaagaccatggacagattcagatcaatcctctcaagacaaagctagtttcagctttgtgtttgaggctgaggacacattgaatgtggaactgatacgggagtttccatggctctaggggaaggaagcaaaaatgtggtgccggatctggaagcagtggtaagctaaggagagaaagtgcagagcacagagcatttattcaagagtaccaggcagggtgacaggaagggcagctgcaagaatagactaaggagccagatttatttgtttttcaagatagggtcttgtctgtcccagggtggccttgaactcactacatagctgaggttgttcttgaagttctgatcctcctgcccctacctcccagatgctggggttacaggcaccactgtgcctggactaccacatagttttagggcagaggagggttgatgtgcgaatctccatgcagtaagagtcactgagcaaagccagcttggaagctcaggatctagccacactgcatagtttcgtggtggtcactgccccgtgctttggccatctttctgtgacaagaggacattatcagatcccacaagggtttatgaggactaagtggtaaaacaatcagagcacttcctggcccactacagtagtgacattttgaagtcactgagtgcatgacagagataattatagaaacacagcacatttgttggccagtactggagcccagctggtggccatgaaggtttccttgtacccatctgctaaagaatgagtgtggccttcagggctcagaaacctgtccccaagcacagctgtcactacagagccagtcctttatgggtggaattctatcatgtgaactagacaggcaaagagtaaaggaatttgggatattggcaagggtttcctcatgagatggacaacactgagttaaatttttgaataatatttgtttatttagtgtgcacatgtatggttatgaacacatgcatcagaatagatggtggagcttcaaggtcagaggacaacttggaatcgtcagccttctactatgtgggttccagggaccagaccaaggtcattaggcttggtggcaagcaccttcattcacttcgacatctcattttgtcagcccaagatgcaatggtgctttgtgtttgtttgttgttttgtttttaacatttagtgtgtgtgtgtgtgttttccaggtgtttcaggcagtatcctaagaaggcattctctttggggggcacatgaagatgtctatgtcaggaaaagctctgcgcatcacctgactccatgctgcacgggcactagcagcagggtgggtcgctaagagcatcccacagtttgttgttctggcaacaggctttattttgtggcttggacccaagtcagaacttgtctggctacagcatgaggctacttcaccgcctatctcttggacactggatccgtgagaggtgcctcttgacaaaactgtgttgggccgtgtgcctgatggggagagccagtttagggttatgaggctgggggaataaaccaggggagtggctgacagagtaggtgctcacaaccctacttggtacactggtgtgacttagggcctgaggaagggcacgtgtgtttgtcaagagctagctgtgtgctgaactgtctgcactcaacccagtcacgacaaactggcagatcttcatctgggatcctaacacatgcctcagtggtcactgggctgagccctgggctcttgagttcttttggagacactgcaggagatactaaggagaacacggggaccagggcagtaggctccgtcctccttgacttcctccttgctatgatctacaggctagagtttcatttaaagattagcttccaagtttaaaagcctcacaaagccacggtcccctaagcctttcccatgattctgagtcttagcccattagctagcaccatggatttaaatttcttttctctgctcctcggttcccctgtctttaggatgtaggttagaataaagagtttaggcttggtctctatgagcctggacttggtgttaaccccttgagtaatctaagcgccatttgtcctgcagaggagctgggtgccgggactcatctgccctgcttcatgggcaccggagttcagttcctggacttgagccggcagcaagtcacactacttcccattttttctttcctccagggactcatgcagtggcagctaaatccagttcatctgtcactcaccggccaaggcctggagaacaggagaggaagaagcgtggcctcacttcctctctgaggatggaaccccacggccactccggaaagagccggaaatccacgaaatttcgctccatctcccgttccctgatcctctgtaacgccaagaccagtgatgacggctccagcccagatgagaagtaccctgacccttttgagacttcactgtgccagggcaaggagggtttctttcactcctccatgcagctggcagacacatttgaggctgggctcagcaatatcccagacctcgcactggcctcggactctgctcaactcgcagcagctgggagcgatcgaggcaagcactgcaggaagatgttcttcatgaaggtatggccggggtctgtgtctgacagggcttacagttgctttctggtgctgtgatttagtctttgaatccatttaagcaaaaatcagaagaacagagttttcattgtacacagcagcaaggaaaaactgaggcagggctgcccaggactcacggcaaagggcttgatagtgatttaggtacggtcaacactcttctctgagatatttggtaagagatggtgtcagtcaaagacagattgagcctagatccctggcgaaaaatggcagccgcaatagctctcatcaccacacaggcatcctttggcatagggtaggcaggtcaaaacacacctatcctgcatacacatatcctgcatggtgctatttgggatctcaaagccttctcaaccaaccagattcttgatgaagaatctcaataacgatggagagtaggtcatatgaccattgcaggaagggcatcacaggcagaggggcagcacatgcaataaagaagaaaagaatatgttaggagaatacaggaggctgatgcaagagggtggcacaagttcaggacaagcctgggctacatagtaagttcaacttcagcctgggacacacaacattttgcctgaaaaaaagtatgttgtgaatatcaagaagtctggaacatggtagtcagagagaaagggaagagtgttaggatgtgaagttacggtagcagcccgggtcctaggcatggctgtggtgaagctttggggcgttattgtagtggtggagcagggaagagacatgattgggttttttttaacactctctggaacctggctaacagtaagggggcgcttcttgggaggctgtggtgataacccaggccaggaattatgtgagttaaactgagggagtggggacagagtcccagaaaatagtcagcaggaactcccatggtctaggcaaagctagaaaggcttatccataggaggatgcagagtgtgaagacatgagaggagttacctcgagctgcacattctagccagagcagcagctcagggaaagtatgtgtgggagatcaggacagacagacagacagtcagacagacagacagacagacatatgtacacacacatacacagagagacagacagacagaaagagacagagagagacagaaagtgacagagaaacagagacagaaagacacacacacagagggacagagatatagagagggaggatgctaacccccccccccccaccatgcctccctctttggagcctcaagtctctccacgattaggtgtgtcttctcccactaaagccagaccagacattcctctgcgatatatgtgctgggggcctcggatcagtgcctgtatgctgcctagttggtggctcagtttctggcagctcccagaagtctgggttagttgagactgctggtcttcctatggggttgctcttcccttcagcttcttcaatccttcccctaattcaaccataggagtcccagacttcagtccgatggttgggtgtaagcatctgcatctgtctcagtcagctgcgggttgtcgagactcctcaaagcacctcacagccaccctctttgccttccagtggactctagtccctgctctgggctccctccttcccctcaacagaagtgccctgttctctggcgtgactcagttggtccagatggacttctcagccttcggcagtaccatggttacactgatttcaaaacaacatctgggagagaccctgtgatgtcagcccctgctctaggaatgcttaatgtgaaactcgaaaaaagaggaagttgcttaaagagacaacttgaaagttaagggaaaaaaggaaagcgccattggacggttgtgtgtggcacacccaggacgtcattggacggttgtgtgtggcacacccaggactgagctgactcctacctacaggtgtgcacggccagcagggatgcttatgagagtgtgactagcctgtgcagtgctgaggccccagtggccacttgcttctgggccagctttccaataggacttcagctcattaggtctagaacgtttacaggaagaagtaagtggatttcctgaatactttagacgggctgtctttttccatagaaatactattttttttttaaattcaattactctctgtttgcatgcctgtgtgcctgcctgcctgcctgcctgtctgcctgtctgtctgtctttcattctttcacctagttatgtgggcaaagatgaccttgagttttttattttcctgacttttacctctgtgacataccacaccaagcttaagcagtggtgaggatggaatgcaggcctccttcattctaggcaagcattctacccactgtgctttagttctagccccaaagagtatttttaaaaatgccttttgagcagaatgtcaaggccaaggaaagagggcactccctccttcccttcctccccaactccctccctctcctccctcccccttcaatatttgcttccagtctctacaataactggattcttgcatattctagctattctctggagtaaagaaacaaatctgggttctggagagatatctcaatgattaagagcacttattcatcttccagaggacccaggttcgattcctagtacatacatggtggcttgcaaccatctgcaacttcagtttgaggggatccaaacctctcttctagcctttatggccacctggtatgaatgtggtgcacagacattcatgcaggtaaaacaatcataagattgaaaaaaaaatttaagggaacaagtttggtgctgtaccctcaggggatctgtgtggagatggcaggtgtgagcagaatgaatcctgtcccttctttccaagctggtcatactgtgttcttaatgaaaagttctatgaagggctattatagcctagacagactcttccaggctaatggctgctcagctttgtgttgtgtaacaaaatagcacaggctagataaattacaaagtaaagaaggttgttggggaaggccatattcacctaatgtcagaactcaggaggtggatgataaagagttgtgagtttttgggatggcttatcttcccccctactcttttatcttcaacttgtgcccatacatttaaggtataggttacacaagcagcacacaattatttactttttatatcacattctttacatttgcctctgttttgtgtcatttcaggggtttacaactgtgttaagcatcttgtcctttgtctagttgtctgaaatgttttatacctgttttctttcttcttatcttttaaactgatatatttgttacattttcttttggattagttgctattcagagattatctttgattcttttatcactaaaataaatattataatctaaatatcataatctcatttaaactagtacttcactagagcacccgaacactactcagaatgcggaacacccagttctatcaacactcacatcctcttctctattgctgccaaaaattaattttgcacatgtttatgatttccaagcataccatgattgttgctctgtgagtcagtactcatttgcatggttgtttatatttatccctctactatcttcatttcttcttgtctttctgtgtcttgctgaggtcatttctgcctgagacaggcctacctttaacatggggcagggtctgagcttagaactcaaatgacctccacaggccaaatatctaaaaagttaaatccagataaaaaaagatctaaaatgcatccttctgtcctaatatcttgacaagcctccatatgagcttgcagaccagcttcagttaaatgcttggagtcctcagagttctgccctggaaagtggttgctgggaggcctatcttgactcttcgccatcactatttgtctggccatcccttctgttcatcatcacaagggccttaggtttaagtaagtgatcacctgcaattccctattcatgccctcctccagcaagcgctggaagcccagagatgtgcatacccatgttgtaatccactcgagatgacacacacctctgggagagaggagcctggtgcacaaatgcttttgataaaatatcaccatccaagtttgcttctccctctctggctggatcttagctgaccatcacatagtcctgaaaatccatttgctcgcttggtactctttggagttggtccttttttgaaggttctgtggcacacagactttgttgagactgggaactggttcagagtaactgtcctttaagtatttatggagagaactctgtatgaatcggcacaatgaggccacccttaagacggagagtctgttggcatcgagctttcttgaaccaacatgtgggcttacattagactttctgtcagcattctctggctggaatctagagccagtggtgctctgtctgggaggatagcagccaggaggccagacatgtgtggggggtcctgctcctccagctgccctccttagaggatgtgcaatgctttgatccacagcgtggcacatcctgcttttctatacaaatttaaaatactggttaggccaagtcaccactcatccagcgtgactcaggggccgtgtagtcagctcaaccgtctgcatttctggcatgtgctgtgggtgcagggggtggaatcaatgcctccctgggcagaccaattccttcacccctctgcctatgagcagcccagtttgtggcttgaggcctaggctttcttggcaagcaggaaacacgataccctggctgcttgtctcttcctgccacagtagagtctcttgtgggtactgagagcagtcactgtgagggaagcttgggtttctaggactcccaaggggctggtaggtccccagagtatatggaaggaggcagagggaggcaagggtggtccatgtgcaggaagtggggagggacagcccacaggtatgattcatgcccacttgctgatgctcacccaaattctctgtgatttctagttgttttcaatgctagaagacatttggaaatatttctttagaagttggcttcattagttggcattttgaatctcattggttttggcaagatgccatttggctagtaaagagtttgcctgggtagaaggagaaaagaggaaactgggaaaagtcagtagagcagctacgtttccaactatagtgtttaacatggtcctttgtgagtaggttacagctcatcaagtcttttcccagtctctgcatacagtccactccttactgccatatggctacctctgtctcgaataccaatgaaccaagcctgggtcaccctgtagagcccagtgtgttagtcagctttcaaggactgtatcaaaataccagagagaatcaactcaaagctataaaggtctattagggttcatgaatccagaggctttatctcagagttggttcagctgtttctgtgttcatggtggggtagaatatcacgcaggaggaggcctctgtggtggaggagcatgctcaacaagtagcagatggaacagagagtgtgagcaagaatgaggactggattcagaggatggggaggcttggttttgtaacaaagtaccacttccaagtggtaagtctgcaagtgagttcttcccctgaggtcagagcacatgctgcaccaggggaccaatgtgagggatgcaggagcaggcgtgcttcttcagtggagcatctgccatgaagccatcactaccccctccccttgccctacgccctagttaccactctcctaattgaaacatcaaccaataaaaaaatacttatgtatttccatcaaagaatacattctgggtgccagctgcaggcaggatgcacacttaatcatttgtgtttcttctgtgagcttaggagaaggttcagagaaagcctcctgacgttccatctttacctgaatgtatagtatatatatttttaagtttagggtttaaaactttttatttaattctggacatatacaaataaatatacaaaatgcattcatactctattattattattattacctttaatctttcctcacagtccagtcactaaccctctctcattctgccttccaacagtttctcaccccattccacctgctgcatctccaagaggataccctcacacccctacaagctccaccaggccttcccactccctggggccccaagtctttcaagggctatgtgtatcttctttcactgaggtcaggccaggcagtcctctgctgtatatgtgttgggggtttcagaccagctagtgtatgctgcctggttggtgactcaaagtctgagagatcttgggaatccaggtttgttgagactgctggtcttctcatggggttgccctcctcctcaacctcttccagactttcccaaattcaaccacaggggtccccgacgtcagaccattggttgggttcaagtatctgcctccatctcagtcagctgcttgttgggcattcacactcttaaagagtgttctatttaccttctgaacatcaggtttaagaagcaaactgagtcctgtgagcatccctacccaatgctatccactcttgcatcctctcatggatgacactatcctttgtttgagtatattatttccctgcttgtccatatactttgctcaatctatttacttacttgaatggcatttggttagccctgctaattgttgattgatgtttgtttgacattttcaccctttacttctgacctatgtttgctttccccatacttctgagtttcttgtagatagctatgtccatgacttcagtgctggagattgagcccaggattaaggtattctgcacaagtactctgcatcaaatctatacctccagacctcttttcaggttttatttggagatagggttgccctaagtttcctacgctggacttgaactcactttgtatctcacccaggctttgaacttgcaatcctcttgcctcagcctctggagcaactgggataattaggcatgcctgccagtatcagcttaattttaaaaatctgtatctattctgctaatctctgaatttaggccatttacatttaaagtaataatttatatgtgagaacttaagtaggttttgttttttaatatgtttgctgttcctccacttatttccttttgcttctctattttatttgaacactcttttaaagttccttttttaaagaatgcgttgggggtttattttatgttgtcactgaggctgctatgtgtatggtcatttataccacacgtgacttgtcaaatcacctcttggtactgacattttatcctccttttttttttaagaccttacacttataccctgccctaattaggtttctattgatgagataaacaccatgaccacaagcaccttaaggaagaaagggtttagttcaccttacaatttatagtcatgatggaaatcaggataggaactcaaggcaggaacttgaaggcaggaacctggaggcaggaactgaagcagaggccgtgggtgaatgttgcttaccaacttactcctcctggcttgctcagttagctttttcatacattccaggaccacctgcctagggacagcataacacacatggtgctgggcccttccacatcaatcattaatcaagaaaatgcctcacagaactgcctaccattcagttgatggaggcaattttttttaaaactgagatttcttcttttcagatgactccagcttgtctcaagttgacaaaaactagttggcatgggtcccttggttctcctaacttttatattaccctcccaagaatttatagcttgagctccacaacagaagatatactgtttgcttcaagcataaatattactaaactcatactggtgacagaatctattgttttcatatgtcccaacactcttacttcctttctggaggttctagctgttttgtcattttctttctatttggaaactcgctttagaccagccgctttcaattggttaccccctctgggtaatgaccctttcacaggggttgcctaagatcatcaagaacatgaatatttacattatgattcataatagcagcaaagttacagttgtgaagaagcaacaaaaataattttttggttggggggtcagcacaacatgaggaattgtcttaaagggccacagaaggttgagaacctctgctttggacaatcgttaataatagagtgacttataataaatccttattttcatccatctaggaatatgttctgtttcttatttgtgcctaaaggatgagtaaagggttgcctgtttgtttgagacattatatataggcctctaacttatggtaatcttcctgtttcaacctccctagtgctgggattatctggaagaagagctttgagacacactacatttctggctgacacttattttctgtgcttagatcctggcacgtctttccttctgccttctgtgtgctcagatgtgacagtgtttccttagagatgtgtcatttgactctacttattttgaagcacttggcttttgatttttaaggtttgattatgaggtcccatgatgttgattgttagggctagatttgtccagttctagcatctcttgtgtctctttttgtggcattgtctagtacaaagaagcctgtatcttgctacttacccctttaacacctcgattatgtctaatttttgtttgtttctagaggatttgtaagtggtggaggaagcattttgatggtggctgctttacagtcctggtcggacaacaccagcacctggcttatctagggattcactcaccatctacttctccaaatagtgcgctcttagctctccaggctgtaaatgctggccttcagttgcatgtgggacacttaggttgttctggtagagatgatgctgttctgtgcagcactctgggtaggtaggtgaaacacgtagttctggtcagctcttttgaatgttggttgccacggcactgtaattttgttgtgtttgtattctgctgggttttatcctcatcatactaccagatgctgactgggtccatgaggtactgactgatggggcagaaggagcttcctggggcccagtgagtgaccatttgctgcacaagaggaggacaggagaagttgtagaacctaggtcttttctgccatgtaggcaaatgagtccttagtagctaggtggcatgatttcctgctgtgtccccctgataaaggtggtggtggaggtggctctacagtcctcagggtagcatgttagagctgtctgtaagacttgtgtaagggtccactccaggtatccacaggccttccttttccttggtgttttatcatacagagcaaactcattttcttgactgctttcttgctttgcctgttggtaactgtgggtagctggactcacaggcccctaaaagaactgtaaaactataaatgttcagaaaatctaggagaaatgctagaggcaaggaccagattttggctgtaaagcacaataggaaggttctgtgtggtggtgaccatgacctaacagtgacactgggctgtcatctctcgggtgataccactggagggaatggtgggaaagcgctcgagtctctctgcattgtttccttataaatttatgtgaatctacagtaacaaacagaatgtgagttaaaagaacagttaaaaattgcatcccatatgctagaaggctgcaatttggaaacagcactattaaaaaagatggtatttatgattacattataaaatgtttaggaaataatgaaaggagagatggagaagtcattatgaaaaaaatgacaatgtttattgaattgccattaaaggaggcttacctgaataacggagatgtttgtatgcaatgcttgtgaaagtgaaaggtgctaagtgtcaattcctccaaacatttattggcgaatttagctaaaatgtctttttaaaattaaaacatttaaattagcatacaaaggcttagatatcattatgatttttttggagttaagattctttactagatattagttcaggcagatgccctggttctggggtcccctctctctataggtcacagtgagcgggtttcttcagaagagcctgtggggctgggagtgctgagccccagggtcagaagcagaactggaaagcctccaatacatgctgcttccatgtttccaggctgggcagcagggaggagaggcccgtgacgtgccagggtttggtaagacagcagctgtacacccgcctctgccaggaggcctatcatagtgggcagcatcacagggttggagggctgagcccagaatatgagcaggggttggcccctgcgtagtggcacctctggtctgaagacagctccgttgagcatctgcagcattggtgtggtgccctggactaagcccacagtttggtagggggcacctgccagggccacagtcaggaggcactccccgctgccctgctcccctggaaccccaggcccagtcactggagccagccctgcctgtggtttcatgatctaagcgcttctgcccacccagagcaactgattctaaggcctgactctagcaatggccttcgcaaatctgcgcaaagtactcatcagtgacagcctggacccctgctgctggaagatcctgcaagatggagggttgcaggtggtggagaagcagaacttgagtaaggaggagctgatagctgaactccaggactgtgacggcctcattgtctggtcagctactaaggtcactgctgatgtcatcaatgcagcagagaagctccaggtggtgggcagggctggcacaggcgtggacaatgtggatctggaggctgccacgaggaagggcatcctagtcatgaacacccccaacgtgaacagcctcggtgctacggagctcacctgtgggatgatcatgtgcctggccaggcagattccccaggcaacggcttcgatgaaagatggcaaatgggaccggaagaggttcatggggacagaactgaacgggaagacactgggaattcttggcctcggcagaatcagaagagaggtggccacctgaatgcagtcctttggaatgaagactgtaggctatgaccccatcatctctcctgaagtcgcggcctcctttggtgttcagcagctgctgctggaggagatctggcctctctgtgacttcataactgtccataccccactcctgctctccaccataggcttgctgaatgacagcacctttgctcaatgcaagaaaggcgtgcgagtagtgaactgtgctcgaggaggcatcgtggatgaaagtgccctgctgcgtgccctgcagtctggtcattatgatgttttaaaacaaactattttagtggagtcttctgtcctctcactccccagcctccatgtcccctcaattctcccttgtgacctaccccacgtctccatcctgtttttatgtcacaaggtgatttgtcccctctcctggatctctcttgaccatcccccagtctccttcctaatgctgtagtcattctgcttttatacccacttaggtatgcacacatgtatgtgacatgctaggaaccgcaggcaaaaaggaatgagtggattttgtctttcttagcttgggtcatcttccttagtatatgcacagcctatctttatgtgaatttatttaggtttatctgttgtatctcagcttctcagatttatccttttctatcttttccttcacttggggtgtagtcagtcacttggctacttttctactttaccttctgccttccaaatttcacaatcctggagataccaacatgagatcttttgctagtattctataggatgcatgaaaatttatttgaattgtatttttgatttatcttgtgcttttaagtaaatctctttttactcttaaaattggtactatgggctgggtgcctttaatcccagcacttgggaggcagaggcaggcagatttctgagttcgaggccagcctggtctacagagtgagttctaggacagccagggctatacagagaaaccctgtctcaaaaaaccaaaataaataaataaataaataaataaataaataaataaataaataaatatactatggacattatatttggtaattttcttgttccagcttctaatttatttttttctcttctgtcctttgagccagtcctctatggtatgttcaattttctaagtatacattccaattctaagattttgattggatcattcgtatctcatattgcttttctgaaccttctcatgtttttcattggttttaggtacactcacaatttttctcacaatacttcttggtttctgcttaaagacttttggcagttaacttgagtatttctgttatttcagtgttgagatctgtgaatgtttttcttactcattttgaaatctgttttggtttgggaatgatgggtaattttaaatcaaacactggatttgtataagttacaactgtaagttgtagcttctggaacttatttaaagttttgttttagttgtttttatttgatattcctctttagtctgttaatctacatgttatttcatatatttcccaatattaaacagctttttggatcattggatggagctgactactattttatttgggagcttatattcatgtgtgagattgtgtctcacattgttgtgctggtttcgagcttgtgtgtgcctcacgatgatactggaatttctgagttttttctttcgttggttggtatcaaggtttgcttcctttccatgtattgaaaaatttccagtcttgtatgtttttgtctctgtgacaaatacctcggagaaaacagtttaaagtgaagatacttattctatcttctggtcccaggagtctccatccagtgtcagcggatgccatctattattgtgcttgctgtaaacttgagcatactagagagagcacatggtaagcttaatctgttcacctcctggcatttaggaagcagagagagagagaaagggagagagagaggagagagaaagaaagggagagagacagagagagagagacagagagagacaggtgggtagacaaggtacatctttcaaggtcacacccagagtgatcgaatacttccagctagtttctgccttctatctactcctcccagtaacccactataagcccactgatggattgatccactggtgagcctagaggcctcgggatgcaatcctctatcagactggatctaccagttgggggccaaaccttcaacgcatgtgctgttttgtttcattttgttttgtttttagggactgcttatattcaaaccataacaaatctcataaaatatgtgatgtggtccttagttaccaaagtttcagatgacttatttctgtaatgatctgtaacagtttttgccatctggtatcagtgttttccttgtggggaggctgactttccagcttatttcgtttttacaaggccacaaagatttcctaatttttctggaattgattttgataaagcatgctttctcataatttcccaatttcatctgattgctcaaatgtatcctgtgtctctttgccatcgtttggctcttgagacagcaccaatagctatgttcctttatgccgtttctgttctcttacccctgggacctcttctggagcagcattaacattttaaaagctttgaacagaaccaacttttgatttgttcagttctctattatatgctcatctttattttagaagttccttatctgctctgttcagttttctttaatgattatctcattaactattttcattttttctttttaatacaaatacttaagatagtaactcatttttacacatattgctgttccttcagatgcactctggaaggtttgctaagtacattttcatgaccagtttgtactaaatgccttacgtttccagtatgctttcctttgagtcatgagtttcttagaaggatgctccttaatttccagatgcacaagtattttccagctaccttcagaaatacatttttactgcttttgaaatgattacagactcacaggaaattacagagatgacacagagaacttccaagtcttcacaaatgttctacatcagcacatctcacataatgaaagttacagtcacacaacatcgaaatggcaaattgggggctcaagaattaagagtattcattactctatcagaagacatcgggtagattacaaccacttgtaactccagctccagggggatctaatgtctctggcctccaagggcacctgcactcatgtgcacatatccacacacttatacataatttaatagagtaatggtgaatttttgttttgttttgtttttttgtttttgtttttttgttttgttttttgttttgttttgttttttgttttgtttttcgagacagggtttctctgtgtagctctggatgtcctggaactcattctgtagaccaggctggcctcgaactcagaaatccacctgcttctgcctctgcctctgcctctgcctctgcctctgcctctgcctctgcctctgcctctgcctctgcctctgcctctgcctctgcctctgcctctgcctctgcctctgcctctgcctctgcctctgcctctgcctctgcctctgcctctgcctctgcctctgcctctgcctctgcctctgcctctgcctctgcctctgcctcccaagtgctgggattaaaggcgtgcgccaccactgcccatctggtgaacttcttaaaatggaaaatttgacattgctataatacatgtggagttctatgtagtttttaatgtacatgtctctttgccatcttttgactcttgagacagtgtctatagctatgttccttcacaccatttcataatcattacatcatccaagcatcatccactatcaagaaagtctccctagccatacaccacccagacacactctgggcccccttaataacattaactatcgtagcaaatattgcttcttttctctccacttagtttctttaatacctcctaatttatttgtggtgttgccagcctgacattatagttctttgtactgctaaaaattgtttgataatcctggatgtaattattttggaagtgttttttgtgtgttttagaagatcccgcgttctgcagttaccttaactaggcctatgctgacctagcagcttcttaaggagtttgatggtttgaatgagaatgtccctcacagactctggcatttgaatacttggtcccctgttggtggtgctgtttgggggaggctttggaggaaataaatcaccagggttggacttggaggtttccaagcctggagtgattgccaggtcattccttctgcctcctgtttgtggttcaaaatgtcagcccccagctaatgccaactgtcacacttgcccaccatgattgatccttatccttctgaaaccatgaaccaaaataaacctttccttctacaagttaccttggccgtggggtcatgttctattttttttttttttttttttttttttttagtgatgttaaccatttgtgaggctgttcaatatgagtgagcatatttggaacacctgtatttattttgtgatttaaaccagttattattgagcagaccaatcagtattaatccttttttaataaaaaacatcatcttagtcaggactggagagatggttcagagattaataacactggctgctcttgcagagaacccaagttcagttcccagcacccagatggaaacttacagccatctgtaactccagttccccaggatccagtaccctcttctggtctctgtagataacagacacacacttggtgcatatatacaggcaaacagccatacacataaaataatgataaataaatctgttttgtctataaagtgcaccaagttttcttttctttttccttccttccttcctttccttccttccttccttccttnnnnnnnnnnnnnnnnnnnnccctccctccccctctctttttttttcttaacaaatttacttttatttatttactctccattagtttaaatctgggatgaatacagcatcacacagattctgtgtccaatggcctttgcaggaaggttgcttcagaatgtgtcatgaaccataccactgtttccgtgggtccattttatttttccccagatcactctggttgtgtttggtttgcctccaggagtcactgtattgtgtctttgctttatacacataagcacatctcttgcctaagtagaggcataagcataaggcataagcacctttaattttaagaagagctgcgtgctctttttggttccggagaccttgcttgtagccttgcaccacagccttccaaacatacttgcttttagaagtcctgttcccagcaggcctccacaggtgccaagatgaatggcagaaagaggagttttattttctttagcatttttttttgttgtgaaagttttatttttattttattttttgatttcatacatgtatagtgtactaacactaatccccctgccacttcttctatatctccctactccctctcaaattgatctccttttctttaattattaatgttacatatatgtatataaatgaattaacatataaacacaagctgctaggtctatttagtattgcttgtatgtacatgttagtaggtacccaaattttaatctaatttctgttcttttgtttttaaccccacacatataagtaaacatacatatggtttttaatgacttgtttcctgttgtttgtcttacacagttcttgctgagaagtgagttaattggttcctgttggaaggcagtttctcatttctttctgcttgctgctcttaaacaattaattaatttgtgtgtatgtggtttgcatttatatggtgtatgtgtggtgtaattgcagatgcacgtgcctacaaaggctggaggaggatgtcagatttttgctttatcattctctgccatacacacacacacacacacacacacacacacacacacacacacacacacacactatatatatatatatatatatatacacttggtatatatatatatatgtatgccatccacacttctagtaaccaattggagatgatataatgcatcacctgtaaatagcttgaacatctaaaatttgatgaattttattatgtaggggccttttcacctggcattttcaccaaattttttccatctttgttcacagacttattgcttagcatttgtttctgtcttttgtgtcaagatttagagaaatggcagtaaaaggaaatacacaggcacatgtgcacacacacatatatacatatacacatatgcacatacacaattatgtgtgtgtatatgtatgtatatatatatatatatatatatatatatatacataatatgtatatgtatgttctatcttgttttgccagcatgtacatctgtatgtatatctgttcaccccttgtgtggttgatgctggcagaggcctgaaggggagaatattggatcacctggaactggagttgtagacagttgtgaggcaccatgtgggtgctaggaattcaaccttgatctctgtaaaagcagccagtgcttttaattggtgagctttcttgccagtgcctcaacttctttattcttttgagacagggtctctcactgaacttggagctagaatggtggctaagctcccagcaatccttctgtctctatccctccccccaaatgctgggattagaggtgaacacatggccatgcctggcatttccctttagtgctaagatgcatgctcaggccctcatgcttgcccagaaagtattcttacgcactgagccatctcctccatcttgcctaccgcttttaaaaactaaatagctcagtttttgtttgggggattttactttttctcagaaactttttgttatgctttaatttctatttcttttacttagggtttgccaagttaaatgagtttatggtttaatgtctctcaaccaatgtcatgtgaagtattagatagatagatacatagacagaggatagatggatagatagatatataatagataagagataggtgatggaagatagacagatgacacaggtctcttcattatggaaatttgttgcatgcatacacttgtcactgtgtcacattttgttttaagctctcattagtatcttccacacctttgtgttgccatctgggtatttttcaaaactatgccccagctctgttcccttgccttcagtcctctctaaacaccctgttcagcctgttaacttctgggtattaatttattcagttctttttttgagcctgctgagaaattttctgtttctcctctgaacttccaatcacttccttgatgtctttaaagcacaaagcctgtcgaattttcattgtgtgctgtgcccactgtgcagtttgcagtgtgtgcaggcctggctttcatgtgtgtggttctcctggctttctctaatcatggcatgctccggggagctttgtttccattgaactgttttctctgatggctcctatgtcccatcactttctctgtgggtgttttgtaggcacagtctgtgctggtgccttcacagaagattcaaatttgctttggtggggtagctggggtatcattagcctggagcagaattaaccaaattcttgtctggagggttgcgagtccatgtggcatgaattaggctaaagcgcctgcaagtgctcactggtagttgtcaattctccggggactccctgcttccattcagggctgtatccggactataatttcctttcactacctcaggatggcatggatccactctactccatatttaaaataaggagataatcctttgaatcatcctcttgatacaaagagaatgtcctgttaggctctggtcttaggaaggagctgagatctctcttgcactgtagtatcccattagattacaaacagcaacgtccaaattcagccactcatcgaataagctcagagccacagaagactccgggcaaagaagctgctccacagcctttagtgcagccaccagctgctgcctatgcatgatggtggtgcctttccgtagacagggttctatcccatttaaaacagttaaacagttacctggctttagctgaaggaacacagtcagtggtcaccaaaccagggaaagcatgatcctcccctgtcctttaatgtcccacctaccagtgtttcctgttttacaagtgtggtgatgggcacctttctaccaacatccacatgtgttttatacaattatttcctacaataatatctgagaatgtggagagacagagttgagaatcatttgggaagtggttgatattccttggagactggatactaggattcttgatggccatcacagataggatgtgatcttgctatgaaacacaggctagtcttgaactcatgggtggttttaaaaacatctgccttagactcctgaattctaggactgtaggcacataccactatggctcactttgaatggttttattatacaggtcatatatcatataattaagtgaataatattctgtggtttcagcagcatgtctgtagaattgtacaatcatcactgctaactttaaaaccatttaccacctcaaaagaaaccccataggttttagaaattccccaaagcccaccctctgtcacacccccgtttcccataagaccatgagcttcagagactatgatcatacttactctattcctatcagcatagttctggacatctcataaatggagtcacacataagtgatattttccactgatttactttgattactatgacacttccagtcatcttattgcagactgtattatcgcttaatcacttgtagttgacacataatattataatgtatgcatataccaagctacctatctgtcacttaatcaacgctgagtacttttctatttttggatactatgaatacttcctctttaaacatttgtgtgaaattttacatgggtgtatgttttcagttttttaaagtatacctaggagtgaaataatactgtattcatttttttgacaaattattctgtatatagtagtacatgcctttagtcttatcactgaggcaggggcaggggcaggtaaattgctctgccagcttgttctacatagtgagtcacaggacatgcagagtcacaaaaagagaacctatcttgaaaattcacaacaaaacattttttttgagaaatcttcagcctgttttctaaatcagtttcattgccttacatttttacctttagtgtgagactcaaaattttcgtgtatatgtatggttatatatgtacgtgttcacacatgtggagattcttgtgtatgtgtatgcaggcccacctgtttgcacactcatgtacaggctaggggttagcttggggtgttatttttcaggtgccacctacctcatttttatgtattaaaatattttaatatgcaaatgaaacaactaactagtagacatgaagaggctattagagttgttctcatttattaaaacactggaatgaatttgaagaacttagtcatcccatttccattcccaatactgtgatatctccatgattctaatgtagatggatgaaggctgaaagcccacacagtctgcctgagttttgcatgatataagtagttttatctgcagtttttactgacaggcccagtggtagtgaaacaatgtaatctatcattgcaggtgaatttatcttttgatggctttcttcttttgattttattataaaattactttattgcagtgaactctaaaataaaaatatctcgcagctagattagagtagccactcaaagacctgttcagttcctaactctactcatctcggtgaacccttagaatggccattctgaaactgtggctcttggattaggattttatatgttcactatcaactgcatctttatacacttagtcatcacctgacccctcccctccacagaaactatgatggagttgaaaatagaaaaaaacgtattagctttatatcttctcccacaactcttgtgcccatttacctgtattctgtactttcccattacctaacgtcactctctcttgactttcctaattagtaagctgtacccatgctaacaatgatttatatgcacttttacacatttcaggctaggatccaggtatgaaagaaaacaccttgtgttctaaggcaggatcgcactgagtagtccaggctggccatcgggctgctaaaaggatggccaccttcccagaagtggaattgtaactgtgtgccaccatgctaggctgggggctgaatttaggtgctagtattgcaaggcaaacatttttcccagtggggtacctccccagcctacggatcatttctcaagtatcttctctctgctggtgggaagagtgagggtgtgactttagcccttgtagcttgcatgaagcagtacctcaccttggccttgactggcatgactactattctgtttcctttctgttgctatgacaaactccaggaccaaagacaactcagggcaggaaaggatttggtctacatttccatttgcctgattttcttcttggagttttactgctctgcctctttcttagagacatagaaccatttttgaactactttgtatgtatggtgtgagaaaacaagtccagagcctaaacttctcccaaggcttacaagtcccactgctccaccgggaaagctcattttgcatgtggactgctagctgacctcactgaaaagactgacacttctggagcttgctggctgcattcctccacattggaaacttttctgttctcttttgaatggagttgctgtgagtgctgcatctgagggaaccccacatcataaccctctttcttatagacataggactgttgtgaattactttgtgtatatggtgtgagaaagaagtccagttcctttatgtagaaatatgtctttccaagtatcatttgttagaatgattcttttcaaggcatcaaataccacggtagcaggctgacctgagccaggaccttgtactgggacaggagcaagaatgggcatgctgaagaggcatgagaagatggagttaggacatggtgacagtggtcatgttgtggataagggggtgaacatcaaagggaaggcttgggtgtgtttgtcacttcccctggagactagcagatatgcaacatcttccttttgactaggtagttgccccacagccaatctgtaggagcctattgttttgtttgtaagacacaatgccctagaattcgttgccatcatcctggggtcaccctcttattccatgggaactatgtagctttccagttttagagtttagggctgttggtccctaaaagcaatatggctaatattaatgttgaaaaagacttttttggccaaggccatttggtcccacgaggactggttggcacagagatggaggtctaggtaatagtggggcgtgttgcctacagaactgctgccatgctctcagtctctgatgaaaacaaggataagtgtgttccaatgactttgttagccccttaacctcagtgacaaagcctcagcatggagagaagccccaccttgggagcaagaacagaagaatcctgttctgtgtgctgccgagggaggcctctgtggaactgctctcagggatcctacagagactcctttcatgagaagctgccccacccaggacatgcttgtccaagagtggtcaggctcctctgggagccaagggaagcagtttgattcccatgaatcattttctgatatgtgatcatttcagaaaaagaggcagcctggaggctttaaacgtaaccgtctctcaaaatcatcactcaaaagtacagagctgtaagtgatggcaaggtttggttagcacatttctcagtctagagagaaggaaaccgagccccgagcaatgatacagcaagttcggagccatgaggaagtcagctctgcaggcttcaggacccaccctccacctcctcacacaattctggtgaggaggtcaccaagtttgacatcttaaaaaaaaacaacaacttgtttgagatttattatgtgtgtgtgtgtgtatgttttgcctgtatgtgtatctgtgcaccacatgcatgtgttacccatggaaaccagaggaaacagtgatgtaagaaggtattgggtcccctggaactagagttacaaatggttgtcagctgccatgtggatgcagggaactgaaccccagttctctggaggagtttagccagtgttctaaactgctgcaccatctctctagcttcttcttttaaaataaaattcttgtgacagagtatacatactcatgtgcgcatacatgggtacacacacacacacacacacacacacacacacacacacagagagagagagagagagagagagagagagagaggtttgaggacaaacttgagtgtcatccttacaaattctacctccttgaatgccggctatgatattagcctggagattgcctattaggctagactgggcagccagtgaaccctagagatctttgtgtgtctacatcgccagtgctgagattagttcaccatcatgccagacatttttgtgggtgtcagagattaaactcaggttatcatctcacacaaagaacactttatcaactgacccatctactcagcctccagcttggcaatgaaataaactcagagcacataagaatactgtggcattggtgttccagacacagaacgtctaaaaacatgtgcattgccttgtttcaggaacttttaggttgcaatttttttcctcagtgacgcaacattgccactaaagtctgatcttcatccatcggtgtgtttctacgtccgccacagtggtatctaaggagacgttccagccacaccaggctaaagagttttcccacaattatgcagatgcttactgtcagggccctcattaggtgcagctttttggagcttacagtctgctcacattgctgagggaaaagatcaactgccatgagacttacatcggagatggctttgtttgggggatatggagtggtaaggcaggagggcccaaataaatggtctcactgccctggagagcaaagtcatgagacaggaatgtgctccagggattaatggagtcccatgagggatcaagatggcttcttctggatcaggccttcttcaaccaacactgaaaatctcagagaaagattccctcaggttaacagagcccctgccctctcatccaggtgggaagggaatggtttgttctgtttcctgtgatttttctgccaccttcatctgactagccaacaatttctattttagataagggatttttataagaaaaaaagattctactattgttaacagttgaaataaatatcatgttaatgatttagcttgggcctgattacaatgtaacaaacatctactgttaagctgggtgtggtggctgggtcctataatcccagtactcaggaggatcagaagtgaatggttatcctctccatactgagttcaaggtcaggctgggctacaggagactctgtcttaaaagggggaaaaggtactgggagaaatagctgcccccaaagaacttgctgtatatgcaggaggactttagctcaaatccccagaacctacattaagaaaaaaataaaaagcagaatttagggcttagtgatgggaatttgtaatccagcactgaagagttagacaggtgcctccacatacacctgcctatgcaagaacatacacatacccatgcaagaacatacacatacccaagcaagaacacacacacacccatgcaagaacatacacatacccaagcaagaacacacacatacccaagcaagaacatacacatacccatgcaagaacacacacatacccatgcaagaacatacacatacccatgcaagaacatacacatacccatgcaagaacacacacacacccaagcaagaacatacacatacccatgcaagaacatacacatacccatgcaagaacacacacatacccatgcaagaacacacacatacccatgcaagaacatacacatacccatgcaagaacatacacacaccccatgcaagaacatacacatacccatgcaagaacatacacatacccatataagaacatacacatacccatgcaagaacatacacataccccatgcaagaacacacacatacccatgcaagaacatacacatacccatgcaagaacacacacatacccatacaagaacatacacacacccatgcaagaacacacacatacccatgcaagaacatacacatacccatgcaagaacatacacatacccatgcaagaacatacacatacccatgcaagaacatacacatactccagacaaaggaaaagaaaggaaaaagtagatatcatttcatcattcaagtacatttttgctaattcatgagagctgagtcttgtatgtcatgtcttgcctattgtgtattctcacaactaggaagagggcccagtacatagtaagtttttagcaaaaatttgttgaatgaatcttgctagttcggtgcatctatatgtagttctttttactgtattttttatattctgtggttagactattataaagtatttaaaaatgtatagataacacaagtacagtcacagtaaaaacttttaaacattattttaagatgagtttagtgtgctgtgtctcatgtgtataccattttctctttactttcatattattagacagttagaagtggaaatatacagtctgaatacacacctcaattgtgcttcaagaataagggtcacccttggatgggtagttatttcccatgcctagtgggcctgcaaaggtcccaaagccacattaatatacattgtcccagtagcatgcatgaaatggagctgatactggagaggagtcttcacattagagttgggacatgaccttacctgactgttgtaataaaaaaagtatctcttggatattaggtgagatattctaatatgctcaaagaaagagttcatatacttaattttggaaatcagagccttaagaatttaaccaaatcaaacttactattgtatataatcacagctttcatagctattgaacaatttcccatattagcacagttaaagattggtaatcttgctcaggttaacacagcgccatctgctgctcgatagaaaaatgacagcctaggcgtctgcccagacttaatctctgattttcacattgactttcacaggaaataaaagggaattgatttgtggtttcttgtgtcagaaaggatatagctttagtttttaaggctgttactggacttctgggtccatactgcttacaaagcccaccaggttaactccactagttgcagaaaattctttcaaaattcaagagaaatagaacagcagccaatggacggagcttaactgtgctctggcacctgtgagagatctctgtatgccatgtaatgcaggtggacttgaattcagggaggctcagtagcctgccaccaatggcacagcagaggaaagctttgaaataaatggggcagatgggagcagtatcttcagagctggcctgctgttggggacagggtgctgattaagaggcaccaagtgagagttcgaggcaggacagaggggggcttcctctcttcagatgttggagaatgtgtaccacttggcacatgtaattaaccaggcccttccatagctgccttctcagacaggtaattatgttagatagaataggggtctccagcacagggcagtactaagtgcctgaccccaaatccctaagctctctatagctacagctttcacatccagtgaaaaatatccaaaggtcatttaccaagccattcaaattcaacagcccacagatatgcttttgtttaccgagtttcccatctataggttccctgaaacacacccacaccacccccaacatgtgtgtgcttgtgtgtgtgcatgcatgcactgttgtggaagtaactgattaaaccgatgtttttttcttttttttattaggtattttcctcatatacatttgcaatgctatgccaaaagtcccccataccctcccacccacccaccctcactttttggccctggaattcccctgtactggggcatataaagtttgcaagtccaatgtgcctctctttccagtgatggtcaactaggccatcttttgatacatatgcagctagagtcaagagctccggggtactggttagttcataatgttgttccacctataaggttgcagttcccttcagctccttgggtactttctctagctcctccattgggggccctgtgatccatccaatagctgactgtgagcatccacttctgtgtttgctaggccccggcaaagcctcacaagagacagctatatctgggtcctttcagcaaaatcttgctagtatatgcaatggtgtcagcatttggaagctgattatgggatggatccctggataagggagtctctagatggtccatccttttgtcacagctccaaactttgtctctgtaactccttccatgggtgttttgttcccaattctaagaatgggcagtgtccacactttggtcttcgttcttcttgagtttcatgcgtttagcaaattgtatcttatatcttgggtatcctaagttttggggctaatatccacttatcagtgagtacatattgtgtgagttcctttgtgattgtgttacctcactcaggatgatgccctctaggtccatccacttgcctagcaatttcataaattcattctttttaatagctgagtagtactccattgtgtaaatgtaccacattttctgtatctattcctttgttgaggggcatctgggttctttccagcttctggctattataagtaaggctgctatgacaatagtagagcatgtgtccttcttaccggttggaacatcttctgaatatatgcccaggagaggtattgctggaacctccggtagtactatgtctaattttctgaggaaccaccagactgatttccagagtggttgtacaagcctgcaatcccaccaacagtggaagagtcttcctctttctccacatcctcgccagcatctggtgtcacctgaatttttgatcttagccattctgactggtgtgaggtggaatctcagggttgttttgatttgcatttccctgatgattaaggatgttgaacattttttcaggtgcttctctgccattcggtattcctcaggtgagaattctttgttcagttctgagccccaatttttaatgggggttatttgattttctgaagtccaccttcttgagttctttatatatgttggatattagtcccctatctgatttaggataggtaaagatcctttccccaatcctgttggtggtctttttgtcttattgatggtgtcttttgccttgcagaagctttgcaactttatgagttcccatttgtcgattctcgatcttacagcacaagccattgctgttctattcaggaagttttcccctgtacccatatcttcgaggcttttccctactttctcctctgtaagtttcagtgtctctggttttatgtggagttccttaatccacttagatttgaccttagtacaaggagataggaatggatcaatttgaattcttctacatgataaccgccagttgtgccagcaccatttgttaaaatgctgtcttttttccactggatggttttagctcccttgtcaaagatcaggtgaccataggtgtgtgggttcatctcagggtcttcacttctgttccattggtctacttgtctgtcgctataccagtaccatacagtttttatcacaattgctctgtagtacagctttaggtcaggcatggtgattccaccagaggttcttttatccttgagaagagtttttgctatcctaggtgttttgttattccatatgaatttgcagattgcattttctaattcaatgaagaattgagttggaattttgatggggattgcattgaatctgtagattgcttttggcaagatagccttctttactatattgatcctgccaatccatgagcatgggagatctttccaacttctgagatcttctttaatttctttcttcagagacttgaagttcttatcatacagatctttcacttccttagttagagtcatgccaaggtattttatattatttgtgactattgagaagggttttgtttccctaatttctttctcagcctgtttatcctttgtgtacagaaaggccattgacttgtttgagttaattttatatccagctacttcactgaagctgtttatcaggcttaggagttctctggtggaatttttagggtcacttatatatactatcatatcatctgcaaacagtgatattttgacttcttcctttccaatttttatccccttgatctccttttgttgtctaattgctctggctaggacttcaagtacaatgttgaataggtagggagagagtggacagtcctgtctagtccctgattttagtgggatttcttccagcttctccccatttactttgatgttggctactggtttgctgtagattgcttttatcatggttaggtatgggccttgaattcctgatctttccaagacttttatcatgaatgggtgttggattttgtcaaatgctttctccgcatctagggagatgatcatgtggtttttgtctttgagtttgtttatatactggatcacactgatggatttccgtatattgaaccatccttgcattcctgggatgaaacctacttggtcaggatggatgattgttttgatgtgttcttggattcggttagcgagaactttattgagaaattttgcatcgatattcataagggaaattggtctgaagttctctaactttgttgggtctttctgtggtttaggtatcagaataattgtggcttcatagaatgagttggttagagtagcttctgtttctattttgtggaatagtttatgaagaaccaggattagatcttttttgaaggtctgatagaagtctgcactaaacccatctggtcctggttttttttttttttttggttgggagactattaatgactgcttctatttctttaggggatataggactgtttagatcattaacctgatcttgatttaactttggtacctggtatctgtctagaaacttgtccatttcatccaggttttccagttttgttgagtatagccttttgtagaaggatctgatggtgttttggatttcttcaggatctgttgttatgtctcccttttcatttctgattttgttaattaggatgctttccctgtgccctctagtgagtctggctaagggtttatctatcttgttgattttctcaaagaaccagctcctcgattggttgattctttgaatagttcttcttgtttccacttggttgatttcgcccctgagtttgattatttcctgctgtctactcctcttgggtgagtttgcttccttttgttctagagcttttaggtgtgttgtcaagctgctaatgtgtgctctctctagtttctttttggaggcactcagagctatgagtttccctcttagaaatgctttcattgtgtcccataagtttaggtatgttgtggcttcattttcattaaactccaaaaagtccttaatttctttctttattccctccttgaccaaggtatcattgagaagagtattgttcattttccttgtgaatgttgactttctattatttattttgttattgaagatcagccttagtccatggtgatctgataggatgcataggacaatttcaatatttttgtatctgttgaggcttgttttgtgaccaattatgtggtcaattttggagaaggtaccatgaggtgctgagaagaaggtatatccttttgttttaggataaaatattctgtagatatctgtcagatcccatttgtttcataacttctgttagtttcactgtgtcccctgtttagtttctgtttccatgatctgtccattggtgaaagtggtgtgttgaagtctcccactattattgtgtgaggtgcaatgtgtgctttgagctttactaaagtgtctttaatgaatgtggttgcccttgtatttgaagcatagatattcagaattgagagttcctcttggaggattttacctttgatgagtatgaagtgcccttccttgtcttttttgatgactttgggttggaagtcgatttaattagatattaggatggctactccagcttgtttcttcctaccatttgcttggaaatttgttttccagcctttcattctgaggtagtgtctatctttttctctgagatgagtttcctgtaagcagcaaaatgttgggtcctgtttgtatagccaatctgttagtctatgtctttttattggggagttgagtccattgatattaagagatattaaggaaaagtaattgttgcttcctattattttttgttcttaaagttggcattctgttattgtggctgtcttcttttaggtttgttgagggattaccttcttgctttttctaggacgttttttccgtccttgtattggtttttttccgttattatcctttgaagggctggattcgtggaaagataatgtgtgaatttggttttgtcgtggaatactttggtttctccatctatggtaattgagagtttggctgggtatagtagcctgggctggaatttgtgttctcttagtgtctgtataacatctgtccaggcccttatggctctcatagtctctggtgtaaaatctggtgtaattctgataggcttgcctttatatgttacttgacctttctcccttactgcttttaatattctatctttatttagtgcatttgttgttctgattattatgtgtcgggaggaatttctttcctggtccagtgtatttggagttctgtaggcttcttgtatgttcagggcatctttctttaggtttgggaagttctcttctataattttgttgaagatatttgccggtcctttgagttgaaaatcttcattctcatctactcctattatccgtaggtttggtcttctcattgtgtcctggatttcctggatgttttgagttaggatctttttgaattttgtattttctttgattgttgtgccgatgttttctatggaatcttctgcacctgagattctctcttccatctcttgtattctgttgctgatgctcacatctatggttccagatttctttcctagggtttctatctccagcgttgcctcactttgggtttctttattgtgtctacttccctttttaggtcttagatggttttattcaattccatcacttgtttgcttgtgttttcctgcaattctttaagtgatttttgtgcttcctctttaatgtcttctacctgtttagcagtgttctcctgtatttctttaagtgagttattaatgtccttcttgatgtcctctaccatcatcatgagatatgcttttaaatccgggtctagcttttcgggttaaaccaatgttttttatagctagtaaagttacaaaatagaacatgactgcctcaccatacacttctaatatcttggagaaaggagatgaaaaaaaaattcaagcttttccagagtcttctctcacacaaggaagagtcatatttcctttcaccatgaaagtgaaatgagaccaaccatattgtttaacatactcaatataatagagactcactctctctgtgagtgtatgtgtgtgtaacgtgtatgtgagtgtgtgtgaagtgtgttgtgtatgtgatgtgtgtgtagtatgtgtggggtatgtttgtgagtgtgtgtgagagagagtatgcatatgaatgtgtagtgtgtgtggtgttcatgtatatgtgcatgtgtgtttgtggtgtgtgcatatatgtgtgtattgtgagagtgtgtgtggtgtatgttgtatgtgtgatctctgtgttgtgtttatgtgtgtgtatactcttttgtatgtgcagagatcagaagtcaacacttccttattcactctacaccttattttttggagacaggatctcaaactgcacccagagctcactgattcagcaagacctggccagtgagctccaggggtcctcctgccactgcttccccagtatggacacaggcatactaggctgcacctggcttttcacatggtactagggatccaaacttaagtcctcatccttactcagcaagcattttatagattacaccagccctagaaactattcatacaaaaaaaaatcattgctatgaaagaagtgatgtcattcaatatggtaagacagaaataaaagagaatcataaacaattgatatgacttttaaggttctaaattaagtgctgacaactagaaatcagtaatgtaataaatttacaatgctcagaagaatgcatggatgtttcaatattctaaagctctataatatatgttcaacaataattttgtgagtgtctttggtagaatctcaggacagtgtagcaccctcattatctctagcacactctctgttcacaccactttccaagccacatcagagcactgcctttctcagtcgtgatctttcatatttgcttatggttagcctttgtttactaaagtgtcagttatccaaggtcagctcttgtctgtcgtgatcactgctgaattcctcatgtctaatgaagaacctgacatatgcatttggtgcatttgtttaatatttatgtaatttctattgttaattaccttttagtttaatgaatgtgtatctaggaataaatggttgcgagtggtcctaaatccaggtctcagagtgcctgctactttagtagagatagaggcaaatcaacaagtatttctctggtccatgccaacagcccattaagctaagcatacttgtcaactctaacttgctgtataaaaagatgggaactgttttcacaggaatcttcttcaacttcctctaaagaaaagtctggaaaaccagaagcacaaagtagcagcttcctgtttcctaaagcttgccaccaaaggacacgcagcaactccaccagtaagtatcttcccaaaatatcttctggaacagggctgtgttagttccttttctgttgccgataaaacaccatgaccaaggctgttaaagaaggagagtttttgttgttggtggtggtggtgatgatggtggtggttggttggttgattggctaggtttttttggcttatgattccagaaggctagagcccataatggctgaaagagacagcaaacagtcatgctagcaggagcaggctgctgaaagctcacatcttgaaccacaggcagagagcagagagagaacttcaagtgagagattttaaactttcaaacccgcctccagttacaaatgtccatcacaaggactcagctcctacaccttcccaaacagcaccatcacctggagacctatggatttacatgggcctataggggccattatcattcaaaccactacaggagtttaactgctcctgaatatcagaactagcaggacagccagtgctgtgagggagattaagactggctcttccctggtctttcaagtataaaccaagatgggagctgtttgtttctcagagaatatttttcacgagtgtgcttcccagacagctggagaggttatcatttgccttaccatgcctctgtgatcagttcttcctgggtgacatgctgagaaagaaaggaaggaaggaagaaagaagcaaggaaagaaacaaagaaagaaatgagcagagcagctcctctagctgctggctgagctagcttctttctgtccctccctatgacctatgttgccttatcagtgatatgatagggcctgaggctggaagacctcaggactcttgattactgtaaatagaatcagaagaatgaagaaattaagactacagtgaaacataatactagccatgctaatactgatctctgctaatgttttcagttaattccatactcttcccatgtgacttcagaaaactcctatgcacaagtcactggaaattctgttctaaacactattttttcttttagtggaaacacactatttaactatatgaacattacaatctactaaccaactctctcttcttagatatttgcattacatattatatagagattatatataatatgtagatataaattactatattagtctctcactagcataattcatattgtttacttgatacattaaattttatctgcacccatgttggttctaaagggtaaccctgttagcctccatatctgcaaatgggaaatacttgaaaaaaaattacatttgtatagaaaatgtgtagattcttctcctcgctgtcttctaaacagtccagcataagaagtgcatgtctatgcatctattatgtgatgataatgcagtaagtttatacaaaacatggaaaagcactacttattctggtatctgcagggattccttgaagcaattattctccgtgaacactgtgtgacagccacataggttgaaagccaagtgtgtggtttatagctagagtcccaccatgtggggtgtagaggtaggatgctcaggaatgtgaggccaggctgggctacagcagttcctgtctcagaaacaaatcaaaacaaaacaaacaaaaaccaaaccaaccaaagaaacaacaaaaccaaagcaaaaaacacaaaacaaaactccaaagcaaaacaaaagagagcagattccagggcgagtgtgtttgggctggcatctagcttctttggaagtgattatctcagtgactttaggaaggtttcttgactctctgagcctcattattctatgtcactgtcagccatccttaaatgaattaggacccatttggaggcttgtgtgacttggtttcttgttaatgtaacgacctaggagttgacttttggcttaaacagtaggtcgatacagcttaagaactgtggccacactttagcctgacactcctccagcagcaaacatgaacacctacttcttcacactgaattatttttattttttaatatttgtcgcacagccttctctctcttccctgtttctgcttctctgctttgctttgcatctgggaccagttacacactttgtcggggctctgtctaaaatgaaacaaagagaccctgttcaaaattattaagaatttcaaagtggcaacagcccagcattaaaccaagctgggagtcttctggccgcaggccctggtgactgcacaggcaacatgttcataatctcagccatgctggggtcctgggagctgatctctcagacagtgccacccacctcccagctgagttcagttactgagagcattagtgggtgactggctataggacagacccttgtaggtactgctttcctggtaccctgactgtccatcacccaagtggcctgtcttccctagatgtggctcagtcagaacaagtgatacctgcccaatttcctccctgtgcccgtaagacctctgcaggtaatggcctccaggaccccagcacatctggctgtttgtgtaagtgtgcctttggtttcttatgcaagctatgacttgcacattgccttataaaacagctggaagacagagctctttagacaaatggaaagatttcttcatttatttagtacatactttggtgactcttgttggttttctacttgggttatcatcgtcttattaatttatcaaactctcagttaaattaatattgaacattggatttcttaaccacgctttagagaatcaaccgtgccctgctctgtcctctgtttatacaggcctgagtccatgtaaggggcagagcacctggaagcacagtggctgcctgggtcaggagaggcagatcctagctcagtggcttgcccatggctgtcattaatgtgctgtctctcatttcaaattcatttgtacttatttctcttcctctccttcattcagtgtaggtcgtggtcatgggaaagcccaggacccagaggtctggattatattctagatttatttattgcaatgaagccactgagcctttgtctgctcactaataataagtagagcagggctcctgaaagcctctgataattggctgtatcatgaggagagttgcccaggccccatcagtgggtaggatgggtgtaggatctacactactattcaacacttacataaatgtagtgcgtatgcagattcggactagatgacctcaggctactggctaagcatcctgtcttccccaggcttctccctcctggcccatctgggagcaattggtccctacaagttacagaggatcagtgtttccgaaaagacttctggaagcaaccatcttggcagggagaagttttttctagcttctttcagagcattcaagaaccaaatctccctctttccattgtgcctctacctctgttctcaatggtctttaggcatcttatgtcctcaggaagcctcatcctgaccctacctgactagtcacttcctttcttttgtttataaacaagtctttcctagtccttgcccctccaggaaggaatctccaaccttgatgcatattgaatttcctgtgagccaccgatcattatgtccttggtatggagggttgggatctccacttactcaacctgaaggatgctagggaaacattgtccctccctgggcctccggaacccctctgccaaggcactggccacatatgactcctgaacacatggcagttcactgtggagaacacagaaactttagaggacatgcctggttgactaagtatgagaaaaaaaatacaacatgaatatctcattaatatttttatatattgtttgtatgttgatggcacatagcttagactagagaacagaaaaaatattaataaaattaaaccaatttattccatttccttttagttccttttatttaaaaaaaaattaacctattttgtttgttttgactctttgagacaggatcatactgtataggccaggctggcctgaactctctcttttccttttttttaatctaaatttttattttctttgagacaagatctcagatagcctttgtgcttttaaaacctagtatatggtggagactccccatccttctgtgtgagtgctaggattatagtatgcactactctgcctggtcttcctcttactttttattctctctctctctctctctctctcatacacacatttatttatttatttgagtacactgtagctgtcttccgacacaccagaagagggcattggatcccattacagatggttgtgagccaccatgtggttgctaggaattgaactcaggacctctggaagagcagtcagtgctcttaaccactgagccatctctccagcccactgccttttactttttcaacatgactaccagatgaatttaaacggcctctggcagcgcacttttactccatgttgggcagctctagatgtcagcaggttaagtctgtcaaccgtaaagatttgcaaactgactgtgatatttgagaggtgggaagtggctggtagtgggacacaggtgaatgacaggaagccccatatcccacacagaccagaaaactgatacttggcatttccatagatccccaaagattcacgatgtctgcctgtgtgtgacatgtgtacctaccacagtgtgtaagaggcagtggtgtgtctgtacggaagactgaaggatttcctggtcctagcctctcccagcctggtctccctaggtgggccactcatcatcttcctgcttggcctccagctcagttcctatcccaggaacctctgtgctctctcctctccctttggttgggattggaaactcttccagcagcctggactagagctgtaatgtagcaattgagaccatgtcacctcttgctgagttggatggggtgaagagggagggagcccattctggtgaagaattctgttgcctgcaggaccaaacttgtggatgaagggagttaaaatgatgctgtatcagcctcttggcagcaccaactatcctgggtgctgaatggtttctgcccacacagagccctgcctaagggagggctggtaattggcaaggctgattttgttctttgtcaggcttggtgtttgagtgcacacaaatttcttcctgttcgtttccccactcccatctctgtttaggtgttaacccctacagtgctggagaaatcgattttccaatgaccaagaaatctgcagctcccaccgaccggcagccctactccctctgtagcaacaggaagtccctctctcaacaactggactacccaattttggtaagatggaggggaggggcctggatatgtgggaggacagaggtctgagttattttcccagcggctgggggatgcttcttagtagttttctgctcacagactgcagagagcttgtttggtcagctcaagcatctgtcgtttagcaaggcccacctgttaagagcctcatgtgccaggcacacgtaaccactgttgcttgtatgtatgcggttaggagccaatgcatagagaaactcctgttctcaagctctcaactaaagcttccctttattttattggtctagtaactgacctgggaagactagggaactatggctttgataagctaaggagtttattatcaaaattctagtatgtagcagaattggcacttggagttgcattacttttaaaaatatttacttatttagcatgtgtgaatgtctatttatgtgtgtgtgtgggggggggtcgggggagtgaataccacacatgtggaggtcagaggacaaattacgaaacctggcttttttcttccatcatgtgggtcctacacacacagacacacagacacagacacacacacacacagagagagagagaaagagagagagagagagagagagagagagagagagagagagagagagaaacagacacaaaggcagacagagtttgactatctatctgggcatctcctgaccagtgacattggtcaatcaaccatcactgatgctcatgcatggtatcactctctctgcataggggcttccaatggacgcagcaagaaaggattctagaagggttgtttctggggtcaggggagggacagacttttgtgtggcttagggctacaaagcctagggtattctggtaactttgggtagatcacctagacaagtaagagcagcttcaagccaacaataggaaaaaaagagaacatcagggaagggggggagggagaaggggaggggaggggagaggggagggaaggaaaggaaaggaaggagggcaaggggagggtaaaggaaagcagaggagaggagggaagaggaggggaagagaggacaggaagagaggaggaaaaaggaagggagaagagaggagagaagaggaggggagaggagaggaggggaagggagtgtaggggaggggaagagagaggagaggaaaggggaagataaacttttttggggggggagaggaatgatcttgaagcccaaatatattctctgtcatgctccttgcaggcagttatgtgtgtgtgttaccttgcaacatctgatctgagtcccccttatacactcaaggctgacatattggtttagtggccagataggaagcagcaggtagaaaatgaaggatgtacagtcacctcctggggaccaagccctggcctaagcacttgaatgcttaattattcctggaagctgcacacacagataaatcttttttttttttttaaatgatcttctacactaggaaactgaggctccgagggacaaagtcacttctccaaagcaatctgctgataatcggcagagccgggagaaccatctgggaaatggatgtggcttccaaagtttcagcacaccaccaaaccatgctgcttgtcagtggggctctgagacacaacgctgctagttgttgaccctttctgcttcttttatgcatctggttaacctccagctgtggaattcatcttccccctttgagtctttgagttctagacttcttgcctactgcacactcatgcctagcgcaagcagggcttttggaaaatgtgctttgagctgaacacaattttatagtgatgtctcgaactcagctcaaggtcttgcttgacctttgagactaattctgagggcagtgtggtgtgtgatgttactgctttcacaaaggctcaccagccaggtcacttggaggaaagcttcctgcataagccaccatatctgaatgacactcctcaaatcaccctccagctcttatactgctggcccctgggagacagagagtggggctcttctccttggctgatttcacaggtggctcatttctaccctctcgggttcttcattacagggcactgcaagaccaactcggtcactgagcacagctcagctcgggcagctgtctgggggtctgcaggcgtcagtcatctccaacatagtgctgatgaagggccaagcaaaggtgagcagagaccatcaccaacaggaagccccagagcagcgctcgctctcttctgggaaagttgctccaaggaagagtgggaccagggttatcatccactcgagggggcagacaagttcattcacactttcttgttgaagttaaggcaattctgattcttccagttccactaagtgatcattctctctctgaggacaccgcagtgctccccaactgctccagcactctccaggctggttccctgctcctcttgacatgatatccccacaatgtcatcttgcctgaaacataagttaaattcccttacattgatttatagggctggatttcacatccacattcagatgttggtagaagaaagttggactcaaacacaaattttatggactctgtgtttccatatgggtcatttgatggccacagatgttctggctctgtcggagcatcctgaagagtcagaatggactctgttctgtctagatgatgacacatcatactaatgtctatcccatgcctgagaagtatcaacaggggaaaccaaggtatagatagtgagagaatgccccagtatctcttgtgctcaccctaaagcatgctacctcatgcctggggctttgtattgggtaccttcctggccacttaccagcttagaggaggaagggtttatttaccctcacagtttgagtgtgcagtccaccacgatagggaaagcacctctgcagaagttggcttcgcccacagtgtcaggagcatgaggcttcttgctcatatatcagtggctccagaaatggaggctgaataggatgtggggtcaggttacaaatcctatcaccaaccttccactggcctgcttcctcgagggaagctttgctttctaaatgtgccacaacctccccaaacaacaccaagtgttcagacacttcacatccaaactgtaccagacttgcacatgcttaaaataactagggtaggcacagggagtggctgccacattttaaggcctgtttaaataagttaactgctcagatgaacagcgggcttatttaatgtacctaacaacacttcagccaatttggggtaagggcttaatggctgctgtattctagggagggaccccaccacatacctggagccgtctttccctgtcacctgttccttctcagtcctgggagctcagcaggtaatacaaagaaaggtcccccaggtgacaagggaaaagtgtgtacagtgtggttctctggacagtcccactttctcattagtaacccagtcgtttggtcccagtgaccacaaggaacgcaatgcaaagtctcaggcctgaggtagtgagtatgcttcgggatgagcacaagagatatctggggtgatctctcaccaccgacatttttgtttccatgtgggctctgagaaccgtgcaccagagatgactagtctatgaagagtggtgccattactagtggcaaccactgctttaagagtttgtctaggaatcaagcacccgatctcacctagatgcttccgaggtgaaccgaagggccctcgcttattctgccccatgtgtgcttaaagtagctgtctgaggccagtcatgaaaaaaaaaaatgaaattagctgacttctgatagctcacagtttagaagggagttccctaaggctgaactcagcttattgggggaattgcaaagatcctttatcttcaacataatgaatggagctgtagatatttcttttgctgttacctaaaccaacccaaattgtctctttaatccactggaaagtctgcaggggaatccagaccctctatctcctcattattaccttgcatggggcagctctgcatcagactgccttggctcccttgtagctgtccccacagcggaacctgtctactgagccccagcttctccctgtgccactgtcacaatccttggatgtgtccgtcagtcctgagaatgacctagaaataaagacagcaaggacgacacccatagtaagagcaggtgactggtgtccttaggcaggggacaggttgggcacaggatggagggtagcaaggggcctttgttagcagaaaggatgctttctgtggcacacactgtgttactactgatgccgttgatgtctctgtgattctcctgggtattgcagtttattctcaaatacaacctgtgaattaagtaccattatttttataacctgaaactgaagttcagagggaggaagtgactgggtgaaaatagtcaagtggagagaatagggtactagttccaacccagcttccacgtgtatgggaaatgccagcttcgtgggtgagcctacggctgagctgctgatatgccatagcccaagctgcccatgaactactcttcctaccttgcctgattaagctctgaaactctgggactaaagggactttgtctcctcctcattcctttctgcaaaggttaggggtaagtccttaggaaatatcagctcaagaaacagctggaatatccctacaatatccctctcttccttacccagggcctgggcttcagcattgttggaggaaaggacagcatttacggccctattggaatttatgtgaagagcatctttgcagggggagcagctgcagctgatggacggcttcaggaaggtaggtttccatcttttcgggtgtggttgagaggtcacaaacagcattcagagctgccagggcatcaaagagactgagagcttaaagtacacttccagggttgtgggacggggctccaggcagtgggcaactacccccttgaaaggttccatcttagtgattccggacaatcattccctgacaacaccacctccccttccaggtgctgttgtcagcctggggtggaagcatttgttctgttccttccttcccagtgcccctgttcaatttctgggactcactgataccccatccccttcaccttctccgcctcctcacctgagaccatgggactgcagaacctgcacttctctcacagtcccaccaagctctaggtcccagggataaagaacataaggacacagatcacagttctcacaccagtgagaataaagggaagtttattctgagccaaatatgagcggacatggcccaaggacatgcatctaagttgacataaagtgggccacatgacctcttttctgggcacagaacaaaaggaagtcgtaagtcagggcattgtcacatagagcagcaggaacatcaggcaggtgggtttcaggaacttgggtgaaattctgatctaggtttcagagagcatgtgatagcattcttagctataggttggtggaaggtggtgatcttaatacattcaaatagccctgagtcactcaccacctttatacctggtagtctgaaagatggtattcaggtataaagnnnnnnnnnnnnnnnnnnnnagggctattaaggcaactaaagctagcctaagttaattttggcttttgatctgcaactctccatagcgagacagttctggacagccagttattcagcagaatttttaacaaagaggtatctttttcagggaactttatccacataaaaatcagacaggacccctcttttgaatggttaatggtctccccatgagcagctctcccttctgccttccttctgcttccctcttctttctctcagctccttttatatctcataggacagatgttccctctaagtaagagacctggggacacaattgccagacaccccactccaccccacctcaagtctgggtttggatgatgggcaaccaacttgttccaaagagatctctaagtttcagtcatggagcaaaattcaagggtaggaacaaaagggaagggaagagaaagaaaggaagggaagggaaggaagagaagggaaagaaattgaattgaatttgagagatcagttactttcttgtcagaacagtgtctgtaagtcaggctggcagtctaaccacctgtaacatctgagctatctgggggcagggggctgtgggaacactacagtcctagatggcaggcgtatatcacaacaaaggaaggtttccagcattctaaatgagtaaaagaatcctgtgagcagctggagagatagctggctttgtagttcagagcactgactgctctccagagaaccagggtttgatttacagcacccacccaattgcccacaactacccataactctagttccagtggagccgatgccctcttctggcctctgagagtaccgagagcaccaggcacacacgtggtgcactgatatacatgcaggcaaaatgctcatacacaaaactgatgattatccattaataaaatatccagtacattgaaaaacattctttcttgatttttgtgacatgtgcaaattaggatgagattcaaatttcagccacattctttcatccaaggccttgatggcttgccttgatgtttcagccctgtcaccattatagagatgttgtaactcccaaagattaaagtatttatggtcttggctctttccagaaaatgctgcatttataactggggaggcactgggcgtagaggctttggatgagtcagaaggcagtgtatagaatgcagttggctggagagagattggaagcagaagagaagtgcagaggctgttgttatggctgcttgaaagagtaactctcccatcgactagagtcaatgagaatagacagagcctgggaagaggcagcacagggatggtgggaagtgtgaatgtttctagtctcggtcaactggagaaaagaaaaggtcaaggaagagagaaatggaaaaagattaagtgggaacttcaggagggcgatgagcctaggtgagcactagatggcactgtctggcaggcctctgaaaagaggtttgcctcggtgggagctcttggtggaaaaggtgaactgaaaggattaaacaaggaaggtgtagaggagggagaagaggagggggcatgggggtgaggatgagatgaggtctagtggaacagctaagcctcaatcaggaagaaaacaagagcctgggagaagggaagatgtgtggcttagaatccagggtgttagcctttgttgttttgtaacttttgtatggaaaccttcattatttggggctgggggtgggggacatttgtctccattagttaatagcaataataaaaaccgagaatttcaaacagtcaattcctggctctagcctcaaacaattggccagattgttttccaaagtgacttgctcaagtctactctgtgaaagaatatgctatccatgacaagcttgctatacggatcaaagccactgaccgttagcttttgttctcctccccaaaaacaattgtgtgaaatggatttggcacaagctaggctcaccagctaggagccaacatagctcatgagctcttgcaaatgaggacacagcagacaagcccaaaacagggttattggtcctttggagtagatattttgataacttaaagccagcctccatttaataaagaatggtcatcccgaagttttgactttgtctattcctttctcagctcacaattaagtatgtttcgattgtgtttgtttcatagccttgtctagctgtggacttgatatgtagcccaggctggcctccaacttcttgtgactctgtggcttgtgattactaagtattcgaattacagtcatgagccctcaaggctggagcattttcaaatacgtttactatgtgtattctcagtcatagagtcttccagtgacaagggttgaatgctgtcattgttccctttggtttcagaagcccaccattccgagctgctctgcagcctccacactgacacataaaacagtatctgagtcaaaagaaacagttatggcaagctgttaggaaacagagttatgttttagtgtagcaaagtcattctttgatgattgatggcccaggcactgctcaagcatggtgaatccaaaggctaagagcaaggtttggagagcacacacaggcacaggacacaagactccaagcatattccaaaatactgaataaagcttgttagctactgtctttctgtctctcaataggtgatgaaattctggaactcaatggtgaatcaatggctggcctaacacaccaggatgctttgcagaagtttaaggtaacttctcagtctttgtccatactctgagtgtaaatattatatactaggccagatgtaattggcatctcagaggcttactgctttctagttattacagaactctagctggcaggttcaactcagctgtcctggctcaaactcctctccaagctgactgattcaatatggcttgtctctgcttttcactgaattgatctgcttggcctcaaactcactctggcaatttattctaattttctggctccttcttattctctggcttcagctgcctctgctgatctgcacccaacttaaacaaaatgaaacgaaacaaaacaaaataaaacaaaactcaactctacttctctgaactcactgactccccactaactctccaaactcaactccactcagctgaactgactctctccctgttctgctcttaaataacttatctttcctgtgctgttctcatgagagttggacacatcctatatttgactcattctgtcaaatctttctctgatttaccactttgtctgcccctcaattagatatcactttcaaacgtggctgtttccttctaaaaactaattttatcttaaaggtgtatactaaggatgtgtttgtattccagccagagggattaaaggtgtgtgtcatgtctgtatcctagctgggtcacacatacctaggtctttagatgagatcccttgccagagcagccatgttgctggattaaaattgctgtccattggagacttcaggcaataaaaccaaacccagcatcactttcttccgcaaggtacacaaaatgaaaaattgatcctttgcagaggtgcctagccaatgctggccctgggcccagcattaaagaaattcttctacaaaggggagtataatcaggactggtgtcaaaggatatccaaactacttaagatttataaagctgcctcaaagcattccatgaacttatactagtagatttgtgaatatgtttttagtttttaagacatcactaaaagctacttttcatctccattcagtttgttcaattcatgagtacatcatatatcatataacatgtataccttggtgcgtgtgcatgtatgtgtcatgtgtaacttgtcacatgtctgtacattacccatgcacatacacctacatttccttggaggaacatctatcattgttactgggcatgtattcttcatctgtctggaactgctccagatacggttactcttttccagcaagccaagaaggggctgctgactctgacagtgaggactcgcctgacaacacccccttcactatgcagccacctgtcacctcctctgtgccgttccctgagctccagcacatgtggtgcccaggacagcagccccttctccttggaaagtccagcgtctcctgctagcactgccaaacccaactacagaatcatggtggaggtgtctctgaagaaaggtaggagtaaggtgccaagtttttttttaattgaatattttctttatttacatttcaaatattgtcccttttcctgcccctgtccaagactatgccagtgtctgccagtctctgtcagagctacccaggcctctatcatatggaaacatcacagaatgaggtttgctagcagataataatataataataaggcataagccttatccagttgggtttaaatcaggtcccttccttccttccttcctttcttctttccctccttccttccctcctcttcctctccttccacccctttatttagtgtgtacctgtgtacatgcatgtgcatatcccccacagagaacaacttgtcggagttaattctctctttccaccatgtgggtcctaatgattgaactcagattatcaagcttagggacagttatctttgcagctgagcactatctcgctggctcctcatcctgctcctggaagcttatctgtgccatctgaacccagacaatatcttttgatgagatggttagcaagcatataacagagaacttactacacacacacacacacacacacacacacacacacacaccataccataatggaccaggccctagactctgcagttaatatcttgctgagaccttgagcagctcactggccctctgtgggcctattttctttcttctgcaagatgaccaaggttttgtttttttttgtttttttgttttgttttttgtttttgtttttttaatctagacgacattcagagttccacagccatcccctctgcccagatgataattctagaaggctttagaggcctgctctgccatagtgaagctgagctgagattggaaggacaagggacagtgttagatgcagagcttgtctccacctacagtgataagcaagcattctggggacagagggaagactggagtagctggtgcaagtggaaggaggtggggttgaaagatggagaggaaggaaagggtttcaacgaagaggctgggaaaccagagaaagggataaatgaggagcaaatgtgtgtaggaatgggggccagaagcaggcaatgggccccttgccggatgcatgtctcagtgcctctgctggaccacaagcttgctaagccttcacgcatctctggcacaaaatctcggtagccatagatctgtctttgtacactgcccatagggctcctgtggtgaagttcagggagcaggcatggcatggtatgtgggtgagtcatggcgttagtctgctgcttctcctgatggcctgcactagaaccagtgctgagatgctttaagcagccacatcatagcctctgtccccgcagattgtttcagtcttgcttggtgtgagcttcagggacccacaggcctattaagccaaagagctcttgccctggttaggagacctgggtatcaggatcgactttgatctctgttcacagtgcatgtcacagcccatattttttttaaccttgataacaataacccacaacagccatccctcttggtgctgttgggagaacaaacatcaaaaggtgaaaccactttttctaagctatgtatgcctaaggaaaacctgaaggaggctctttctccttactactccatggaccttccatttggtccttcctagctgccatgtttttgtttccaaggcctttccaatctagccaaccatctgtctcctctgccattctggaggtccccatacccctaacatcacctgcattctgtttgtctaggacccatgtgccctgtgcaaccatcttcttctcacatcttcccagttacctcatggacggcatgggtgcctgtagggcaagacttcataggtctggtcctttccagatttccttgtttgaaagcagcctgtcgcccaccaatccctcaattcaagactgccttggagaaattttatcatgctatgcttatattccacccctttggagtatattctgtgcactcctgtttctgctttgctgccctctttacccctctggacctttccagtgatccttgcacttccattcttaaccatccatagttatctctccttgtaaagccagatatattactaaagatggaagttaaggtataccacttcctcattcctgactgtcccatggcatttcttctcagtcaaagagtttgtttttgtatacctgtgcatacaaagccttttgagtccagcccttgatccctgccctatgccacctcatctctctctgcatcccgcattcctggttgcctgggatccatgctcttgggtccatcacctctctgcatgtctatccatgttctgcccacaatggcctttcaggacctatagcaacatgatgtattcctcccagcccagcctatgcctgggctgtttccgctagtcaattgtctgccctgtctcctcatcctggctctttattgtcatccatggtttagactaaatgtagtccctgaggcatgaagggctgtgctgccaccttctaacacggtcccattcatttcctgcatagatcactgtctcctcccctcttcccacttcctctagctcttgcctggtgtcttccctctctcatttcctagtgtttctccatttgaccttactacacccccttctcattgtctgctttgggcatcatttggtccccaagtggcccctgtgcacagtgacacgccacacacagggctggaatgaatgttgtgtccaagacacttgacaagcccaggatgtcaggggtcagagacacctaataggctagtccccaccccagaaaggctcacatcttccactcttcctccattttgcattccagaggcaggtgttggcctggggatcggcctgtgcagcatcccctacttccagtgcatctcaggcatcttcgttcacacactgtcaccaggatccgtggcacatcttgatggacggctgaggtgagtcctcatttctgaatagacccttgtcttacagcatggagtatcttgagttgacctcagcagaaatggtgaaatattcagtcttgattctgttacacatcaacagctgccatgtcagtcacctggtgtggtaaatacaatttgggtgtttttaaatcccaccttagattgttttgttcccaaacgaaagacacaaaagctttatatttataataagccttaaaagtactagagctgggctctaagctacttgatctatttccctgtcaataaccctgagatatcatttggcctgttctacctgggttgctctttcaactggctggccatgttctcacaatccacccaccacatgatactctcttccttcttcttctctttaccttgtggtctctgcctcagacccaaagcctgggaacccaaactctgcctacctttctcctgctcaagccataggcatctttattgaccaatcagggataattttggggtcaagatgacatagcatcacttggtatacatagggatctcttcatccctgatgatccactcattgggggcaaacagatctcaggggccagtatttagcattgcaatgcacagcaacagatcaaacctcaacagcaggattgcggtcttcgcagccctacaccagagctgctatgcccagtgttactgattcctaagaagtctgtgtgcatgtaacagttaaagaaacacggcttctgagaatgccgggctgcaagggcaaatagaaaggaagcatattttaactcagattcaacacacagaatccatggtgtcacagatgggcatctctcaggtttacctgtgagctctacatgcagacagaggtgttttaagccaaccagccatgtccatgcatgtccttgctgagagaagcaaaatgattttagatactgcagtcacacctctacaaagaactcctgcaatcagtaagtgatctgattaggtagaaatcatttatcttagtttaacctgttacaatacttttgcagctattctaacatctgccagtggtataaatgcatctgttgctaggacacacttttgctaagcaggaaggttttgtcctgattttcagtttttttttttcctagtgtgagagtcaggatagagatgcggagctaggaatagatctgtgctgccatctgcaggagaagcactgctactgtgctggggacattcctgcagagataggggcccaggagcagggctaggtgacctagctctagagtcagggcatcttgttgcagaattggtggacccaactcagagttggggtgtttattttatctcttttgcccccatcagaggcccaccatggggtagggactcttctgtgttacatggctggagtcttcaattattcaaaattcaaaaaattaattaaaaatccacatccagagaatgtgaatcatcttggcaagataagggggtcagctctgcagaaacacagaaggaagcagggggtgcagagtcaggagactcaagttctcattctgacccagctgatcacttgaaaacgactacctgctaccttcgtttacactaacgttttgtttgaacacagccatgcactgttcttgtttgctgtccaaggttgcagctgtcacctacagtgacagagttgaacatttgtgacacagacatcatgtcttggaaaacaaacatttactcttggctctttacagaaaagtgtccctccccagtataggttgcaatagaaaagtcatttcaccattgatgccccagtttctccatctgcaagggtggaaggaattgggccatgtcttagggttactattgctatgatgaaacaccatgacgagaagtaccttgaagagagggtttattttacttatgcttccatatcactgttcatcattgaaggaagtcagaccaggaactcaagcaaggcaggaaactggaggcaggagctgatgcaaaggcggtggaggagtgctgcatagaggcctgctcagcctgatttcctatagaacccaggagtggcaccaccacaatgagctgggtcttcccccatcaataactaactaagaaaatgctctttaggtttgcctataacttgatattctggaggcattttctcagttgagattccctccttgcagatgattttagcttgtacaaagttgccataagacgagacgggacagtttatatcaacaacacgatacaatcctgtcctttgtatctttgttttctgtttcagtggttgtgttaaccagcattctgtcactgtagcgattatctgaggcaatcgacttataagaagcgaggtttattctggctcacagttctggaaaatccatatgtgtctgaccagtccgacggcatgtgggtctgtgatgaggaaacacattagggcagggagaggagccagaacaaagtgttcacctctgtctagaatgctgacaaagaggagagagcagagccacagtggtccctgcaaaggcaccccccctccagtaaccagagggcttacgttgggccctagctcctcagtttcaccacctctcaatagcacccaatggaggattaagcctttggtgcaaaggcctttggaaggtaccattctaatccacagcacagcagttgctagtacaagcaacacccatcttggaactaaaataagtttccttggcggatgttcttgcttctctttgcaaggacctctgctgcatccttcctcagtgatttctttacctttagcacatgctgcccagtccttcctcctccaagacactctacttctggggacatcaagggccaggatgtggtgaattatgttatggctggtcagctagagagggtaaagcatgacttcaatgttgagcaggtcaagggaagaaggaagggagagtgacaggtgaacagagtttgtgttgactgctctgtgcatgaatcactggcccagatggtccacagtgacaggagtgcattgctgcattgacacacaaggagtgggttcctgaaaggtgaccctctttctgtcatagttgttagtgtgttttaggctcctgtgggtgcttttgcaggtgtggtgatgagattgtggaaatcaatgattctccagtgcactgcctgactctcaatgaagtctacacaatcctgagccactgtgaccctggcccagttcccatcatcgtaagccgacatccggacccacaggtaatgtgccatcaggcttttctctgcctaggctcactcgatcagtatgaacgtcagaggaagaacggaatggaaaaagagatgttgctggctggggtttgatctgtactcatccaaaccctttcagactttgtgtgggaacaactctctatagcagagacccactgacaaactcctagtcagcagaaacaattgatatccacgtaggaaaatcttatagctgagttacacgtttcgggacagagagacagaaacccagagtcccatgtatcaagtgcaagcgatctatttgtgtgtgcacctggtgggcactcacagtgaaaatatctagagctcagccatgaggatttaggattgagcaaatttatagtggggatcccagaataagctcatggccccagtaaagagaccacagagaaggggcaggatcagtaaagcagaggtcactagaggttaggtttctctagaaaatcatcccagtaaatgggagcacaaagttcaacgtcagagtcagaagcaatgagccatagctttgtaaaaaggaatgttgggtggaattgtactataagtgtgctcacactgctgctgagtctgttcttttctggatacagtggggagctataggccattagcccgagatgcaacaggttcatattttattgttccgacctttgaacagggtagaatatgtggagtatagaagagagaaatacaatgggagctagagaaagtaaccaaggagctaaagggatctgcaaccctataggaggaacaacaatatgaactacccagtaccccccagagttcgtgtctctagctgcatatgtagcagaagatggcctagtcggccatcagtggaaagagaggcccattggtcgtgcaaactttatctgcctcagtacaggggaacgccagggccaagaagtgggagtgggtggggggggcgtgtgggggacttttgggataacattgaaaatgtaaatgaaataaatacctaaagaaaaaaagaaatagatggtgaggccctgtgctacacagaaggcataggaaaagtctagagaagaaggaatgagaagccatacttgtgaagattcagcaggggctcctcactacttagctttgggctaagagacagaatgtgacttagggattggaaaaggacagaatgacctaggagttggggggggtaacatgtttctgggatatcaggatagagacactacatagggagctaccccgagggttgatgcttttgtgagttccaggctagacctaagcttgagacttggtgccacgctgacaggtaggtgagaccaccctgggctccctggtgagagccatttccactggctattcactgtttcctagatgtgaatcccagtaaatgagagcacaaagttcaaagtcagagccatagcttgtaagtggatgacaggttttgtggagcaggcaagtgtgagagctgatgttgactggaattgtactataagtgtgttcacactgctgatgagtctgggttgccaagctctgaggctattgtgttgttcctcactccaagtcacagacaatgaaaccaaggcttgaaaggagaaggaagctactcaatagttgtcttgagcgcagcctctcagtcagcagtatagttcagtggttcgaaggctaccaacacagttgtgcaaccaccaccaccacgttttttgtcttgagaatctgaactctacccattaaaggattccttccacagggccttagtaatcacttgtttgttattctgttatgccttcacacctcctgtaagcacagccataactcatttgttctgttgttacagccttaagacatttagcctttcactctcatggtttatccatgccacaacctgtgccattcgccctcttttctaaggctggccaatactcccatgtatgcatatgctgagggttctttaagcacttagctttcaatggagagttacttgtttctacgctggactattgtgatggtggaaaaaagaacacgaggtatgcacacggctttgagataccttttcagttcttggtttgagacccatgcctcacacactgtagttcacactgccctggcaccacatagctcaaactgacctcaaacttgaaacaatctcatgtttttagtgtctcatgcttccaagtggcacgagccacttggtatttgtttgttcatttgtttgtcttttgtgtatatgcccagatgtggctcctctgctatttctattctaattatttaaggactgtctactgtcttccatagacactgaaccactgtacatccttatcaacatgctcttgccaagacttattttatttttatgtggtgtgtgtgtgtgtgtgtgtgtgtgtgtgtgtgtgtgtgtgtgtgtgtgtgtgtgtgaatgcagtccctggagaggccagaagacgccgctgaatgccctggacctgttcagtgtgagttttggaaccaacctctggtcttccgaaagagcagcaatctttctgagccacagaggcctttctccagccccaagattcattcttttctgtttcggtttgtctgtctgtgtgagtagctaccctgatgggtgtgagttgatttttctctgtgattgagatttttgttcagggtaagtgctattgaacatcttttcacatttcttgactatctgcatatcttctctggagaaatgttcacccaagtctttcacttatttttttccaaataaattttggtttttgttattgtcctttattgtctggatttttatattttcactagatatacgatttataggtatttttttcctcgtctgagagttgtcttttcagtctgttgactatgtccttgaatacatacttcgaaattttggtgttagctacttctttattatttattttactgttgaaaatgatgtgtgtgcatatatatctgtgcatgggtctgtgcatgggagtgcaggtgccccagaggtcaggagtcctggagtcaatgcaggcagttgtgagccaccctgcatggctgctgggtaccgaagtcttgtcatttacaagagcggtgtgtgctcttaacttctgacctgccccttctgcctaggaggtttatttattgtttttatcttttgtttctcacattacccttaatttattttgtaaaatacactctttctacactgtgaagattttgttgttatagtttacagaacaagaaattgagatttagaaggttaagctgtgtgtcttagagtctgtgtctagtctacgaagaaactgggatcggggtataactctgcttgattcctagactcacacttgactgttattttactatatgtgtatgggtgttcgcctgcttctgtcagcgcactgtgttcatgcagtacataaggaagacaaaagggggtgtcatattcctcgatactacagttataaataattgttcgccaccgtgggagttttgcagtggtaagaagaaggttggaggaagaaccaaggtgatcactggtgacacctttattgatggacactgatctacaccaggaagaccctggggacagggtgttgctcagggcacttccagaagctgattggtcagctcttgcagagtggaaagtgaagccatgcatggacaacagcaggttcagactttggaatctgctgcgcctgcctttgcttcttgcttgaggtggtcgtggatgttttccaggtttctgaacagcaactcaaggaagctgtggctcaggctgtggaaggcgtcaagtttgggaaggacaggcaccagtggagcttggaaggtaagggaagtggtgaaggttgatttgagaaactttatctcctgagaaagcttggggtttggccattaacccgccctctacctcagcactatgagagcagtcttggtaagtgtgcttgatactagatgatagttgaaaggcaggagcctgccagggaaatttggctcacatttttttttcctgcgtgggcaaatttaaaagtggcagatgctccgcagtcagttccatccctttcattgtctgccagaggtagctgtaggccttgcctagatagtgccccagtaggcttcaaatttgcagtccctactctgtaataataagcactggtaattactaattaatcttaatgtaatgtattatttcactacatcctcacatctaatttttatgtacatattatcaaaataagcaaggccctggaagatgccttgccagtcatgttaccagtccatggaaaaactggtcagggacctggcttgctaggtggttcctgtgcttagcctttgggcattagccaggtcaccttggaacatccatatgcaaggacaacctgatattgtcaaggaagctgaaatatgtgggaaaatattcagaggagatggcaggaccccattttatttccgctatgtcctactcagggctctacacatcccatatgcacagaagcacaggggagtgacagggaatccctcccatccccaacactgtcactcgctgttcttaatagtggaagaggagaagatgatcagatgcagggggatgttagcttttatgccttccttcagtgatttaggtctctcaaataaagatgtgttattctgtgaccaagatagagcaaaagcttttcctttaaagtgtgtttggactggagtctcactcactttgatgttttctcataagggtccctttagctctcctggttctactgaatgaatccataagtcactaggtctctgtggctcccattgccttgagttgcagcttcaagaaaggggtacctgtgaccatttgtcactaggaagaactagaaagcatcttagagatgtgccaatgccactgttcaggaaaccatgggtgtggagtaagaaaggaagggaggcaggcgggctgcatctgcccctcttttgttggaagatggtaccccttcaggtgtaaggttcaaagcacctccaaatgttttctttctttgctcttgaacttcaaagagagcttagcaggtagaactgcagctcctttcacacaagcagaagtggagtgttaggctcatcccagatagcgcgtagcacataagatataatttagatttccttgggatctgctcctatagagggagtttaatagaggagtagagtttggtggaactgagatcagacagtgctggggctctgcagctagcatgatctactcaagtcagaatgagttggcaggaatgggtagatctgtataaactgccctcacctccaccagaccctgaaactaaaatccctcccacattggcatggtagctcaccagtcttcccacaattggggcactgagctcttgcatgaatagtaatgctgtgtggtatgagtggtgtgtccctgtggctgtcacatgcaggctcagaaaggttgaatgatgctcttaactcaacgttagaaaactcatcggagtctgaacccaaggctacccaggctacgagtcttctactagagcagttggatgcacagggtgctgcctgtggtccacctggtcttttgaggctcagtttgaatgtttccttgtgcttaccatgcaggtgtcaaaaggctggagagcagctggcatgggcggcctaccttggagaaagaacgtgagaagcactcagcgcccccacatcgaagggcccagaagatcatggtccgatccagcagtgacagcagctacatgtctgggtcaccagggggaagtccctgcagtgcaggtgcggagccacagccttctgagagggaaggcagcacacacagtcccagcctgtccccaggggaggagcaagagccgtgcccaggggtcccatccaggcctcagcaggagagcccaccccttcctgagagcttggaaagagagagccacccaccactgagactgaagaaatcttttgagattttggtgagaaagccgacatcctccaaacccaagcctccacccagaaaatactttaaaaatgacagcgagcctcagaagaaactggaggagaaagagaaggtcacagacccttctgggcacaccttgcccacctgcagccaggtaggagggtgtgctcagtgggacgtgtgtcccctgcaacatgcaaagctgctgcccttgagcattagaaatgtctgcaggcttcctgtactctggcatagagaagcactctctttaagctcactgtgcagagacatatgaagcttcgcagaaccaaaccggaagttccgggcctgccaactgttggcagtaacactcgcgggtcacatggctcacgcgctggtgtatcagcagcagggttactttgtggtggggaggctgagtccaggaatctgagatgctctgctaaccacaagtagtcaccccaatagctaaagcagagggagaatgattgcttgtgggagtacaagatgttcgcgagaaattaactttgccttctggaggtggggagactcggaaaccatcctctctaagtctaggtgtccttagctgctactttgggctttttgagtggctccctctacaggctgttgtgagacttagatcttcccttccgtatattgaagactccagcaccataacttctcttggagcttcttcctctagctttacacccaaaggatggtaggtagacaggaaggcagctgctgaaacttgagccctttcaacaaaggacactgttttagggtttctattactgtgaagagccaccaagaccatggcaactcttataaaggacgtttaattggacttacaatttcagaggtttaatctattactgtcattgtggaaaacatgacatcaggtaggcagacatggttctggaggggctttgttttacatcttgatctacaggcagaaggagactgccacactgggcatagcttgagcatataagacctcaaagcccgcctccacagtgacatacttcctccaacaaagccacaactactctaacaaagccacactccctactagtgccagtgcctattggccaagcacttaaacacacaactctatgagggctgtccctactcaaaccaccataggcattatgctagatatgttcacgcacgttgttttagttcatccttccccgggtctgagggtgagattcccagtttcacagaagaagaacttacttaagtttgtgttgctgaggcgtgcagtgaaggctgctaggggtgaagtaaggcctctggaaatcccctagaagaaagcaggagatttgtcaaactgcccattgacaagcttcagtgaggtggatggggaaggaaattcttgagttccttggtgaagacacagtgaaggaggagctgtgttaccaaacaggaagtacagactttcaggcagctgaacgtgccgggctgactagcaaccagagagggcggggtatcctgtgaatgtgtttccctgactcccccttcagcaaacacttcatttggatctgaggcagaatctagaaggcaaaccagaaggaaatgttgaaagggtagacattttgctttcctcctgcagacccaggaaaggagaacaggtgccttgatgaatctctttggcttcctgattgggtggggccacatgtcgggcaaggagcattgccaagtaagacagccaggggaggaagcaggtgttctgtagggaaggccaggcaaggagccaaggtatttaagacagcacacagacaaatataaacacatgtatgtgcgagcatgtgctctctctctctctctctctctctctctctctctctctctctctctctctctctctctctatctctctctctgatttctctgttcagcatcccacatcttgagcaatctgccctgcctttggcttccttccctgttcacaccagcaatatggtccacactaacacaaaggccgttctgtggctgctcttttgtcctctctgcatcatcccacatggccagtagacccttctgtaacttattcactcaaccaacagagcattgttgtgctggcagagagatcacaaagacaggcttctagtctgacagaaaacaggaagcagttgaccttctacaccattcttaacagccttggccactcccagacctttctcaatggatcttattgcctgtgattccattttcaacccttcttctctctcccttttctccctcttcccttcttttttcctaccttcttctcttgtttctgtctgtagtcttttctctctagggtcctaagacccttctcaagcagatatgtacgacaggttacatttaatgtaactgaaggtaacccaatttcctgtacccaaatgaccttcaagatacttcccatgaacctggagagatgactcaggatcactggctgctcttctaaaagatccaagctccattcccgcacttacacggaggctagtaatcaccggtaactccagttcctgtggatctgatgcccaatccggcctctgtgggagctctgtgggcacccacactgtcttaaaataccactcacatttaagaaaatgattttgtattctctgattagtccccatctctcatcctcttgccttacctcctccctctcccctcattcaccaagtgctgagccagggaacatttgcctgaataaattttgtgtagaaatcaaattaagtttgggattaatttaaaagaccttttccaaagataatgcaacgtaagaggtgttgattaaaaggtaaaatgtgggttctgagaagacaactaatcaataaaggagctccagagaaccataaggtcctggcccagtccaagaacccacatcaaaaacaacatcacaagaccaacatggaaaggcagaggcaggcaaatccctggggctggtagccagccagctttgcctatttggggcactctgaaccagcgagtgaccatctcaaaacacaggtatgtagtttctgaggaacaacacctgaagtccctttggcctctacacccatatactcacaggaacaaggacacatacatacaagtacacatgaggaagaaaaaggagagaaaaaggaagagaagagaagaggagaggagaggagaagagaagagaagagaagagaagagaagagaagagaagagaagaaagggatagccacaaaatggaatatttctctgctctaaagaaaagttaaataaaaaaaatcagaaaaaaagttttttcaggaaaacagatgacatagaatgtatactattaacccaagccatagagtctcagaagtaaagcacatgtttatatgagagcatgttggatttagccaatactatatatacacatgtaaacaaatgtgttgatatatcacacaaagacagaaagaggaaagctgagtataagggacaaggaaggattggatgcaggtggtgagaacaagttggaaaggggatggaaagttgtagtgatcatgtgatcgtggatttttctgctttgagtggcaaataagtacatacattatatctgaccctggaaatgtaaaatttaatatgaagcttcacggctttcatttcaaagcccaattcgaattgtatataagttgtatagcctttgagtctggttaattctagagtgtgattttttttttatttctttgtaagttttttaaaataaaaaacaaaacaaagcaaagttcatttaaaaaaagaaaagtgagacagacacacagatattgctttagttacttttctattattgtaaagagacaccacaatcaaggcagcttatagagaacaaagagcttattaggcttacaattacaaagggtcagagtccatgaccataatggcgaggagaatgtcagtaggcaggcctggtgctggaacagtagctgagagcttacatgttgagacaacaatgcagtagaggagggtggattggaatggtgtgggctttttaaacctcaaagcccacctccagtgatatacttcctctaacaaggccacacctcctaatccttcctaaacaactgcaccaactggggaacaagaattcaaatatatgagccttggaggccattctcaatcaaaccaccacagacatacactaaggtcttttctaagatggtttgatggcattggatatgcttctctgtaaaatcatccaacaatctgtagatatggatggcagtcacctcacagaggtgactcccgaatgcgcaggacttgagagccaccccagcacagtaaaatatttctcttccacacatgaatacatcagaagcatcacctgaatggggccctggctttgccttttcttctagaggacactatgcttgctgtcatgcatggttgcctagggaagtctcagctttgctctagaaccagatgccaagcatttctctagcaagtcttctgtgctactgaggttcaatttgccctctgctgactctggacctcttggtcctgaagctcactctggctttgtggtaactctacctaaatagtaggtggatacttggtatctgatccagctcctcatagggctgttttaaggagaatttcgagacagcagccctcctcatagagaaagaaacttcaataagtgtatggtgtcaccctaggtgctgcagagggaagcccgaagttgggtgctgacttggcactaagcttgagaatctcagagtggagctcagttggtagaatggtttttttctagtagaacagaagcctggatttgacttccaacactatataaaacaatatggtggcacatggcttgaatccatgcccctgggatattcttaactacacagatagcttgaagctaatttcggatacctaagaccttgcctcaaacaaaatcaaaattggggctggcaggaaggctcagtgggtaatagagctgttgctaagcttgatgatctgaggtcagtcctcatgtggtggagggaaaggagtgattcctacacattgtcctctgatacttaggtttgtgctgtaaatacaataactaaacaaatgaagaatgctatttaaagaacttaaaaccagtgaggtacgcaatggatgtgcttttcttctgagtgggcttaggtcttaacttaggcaacattagaagacagttcccttggcccctgtgtgtacctcctggggtcagatagtttccccacatgccattttaagcaaagttgtgctggcacatttgttatccccagctcttgtgcccatcacagacagccggtaactttccgtgtctatgatgcatggtgcacaacaggtcattggaagccaagggaaacctggaacatctaagagggactagctgtacagcaacatcccaggagggaagagacccctttctcatgactgctgggaatttcccgctaaaggtgtctcaatactcactttcaagtcctaatcaaagagtgccttgccttctcacagctgtagactaccgttttgacacagtctggcttcctgtttacaccacaggaaaccagagagctgctgccactgttgctacaggaagacactgcagggagagccccctgcaccgctgcctgctgcccaggacctgcagccagcacgcagacttcatcctccacagaaggagagtcaaggaggagtgccagcccaggtgagcctccgtaaggatcttccagaaagaaaatctttctggagaaagttctatggatcaagtaggtgctagagtttggtctgaggtcagtgttttgcatggacacagtggacacagcctgtgactggggttggtggacagtgaggtgtcctgggtgcaggggcaagaggatagtggaagtgttcattagagtgatagatgtgcttcctggttgaagcagtgattctggggtggtggtggtggtgctggtggtgggaatgcaagcaattcctgagggtctacatggacagatgcccaaaagtttcaatagtccagctaccttgagcaactgctttaaatgggtgtcagtaagacaacacacttcatgcactatgctcaaatctgagagtgcagcatgggaaaagccggagcagtggtcaccatggcgaggaggtggatagcaagggtagttccaagtggtacttcagtaaatacaacatggtatcttggttatttagcagcttactagaaagaacagaggatcccgggttcacccatcgttaattgtgattctgggcaatcagctttgcctttgtcagctcattcactagtgagcaaatatttaagaccacatagaatcctaatatgtgatttactgctgctagcacatggtgaatgttaggtaggtgaggctgtgcttgctgccagggatgaaggaggaaggagtgccacagacccgttcctgacctaaggagctcccagtgtcgcaaaagagtaaatagggaggctactaaccatattccccatgcatggtaaggcctctggagagttaagggcactatgaatgaatgatctagacttctcacccagagaggtgccccaccaagggagactccacctgaccaccctcccttctcttagtcatctgattgaggacacaccctagtttgcagaggacttgcctgtggagctttggactcttccattcttaccacataagccccttatagctgaacactttgtaaatgtagagacaggctgagaggaccagatttccttgctgaagtcccatagtcagtagtacctactcagacctccatgatcatgcaagggtactctttggtagcagcaaagttctacttcccttgaggctaggcactgtgacaggacataggaggaagcagtattcatcaaacaagggtgcattctcatatgaaaaccgtctctgaaacatgaagtccaagcagcctagttgtatgtagagaaggatgaggcatggtgaacacagagaacagcccagtgacttccctcttgtctgttagggctcatgtgccaacctctcctgctcctcaggaagggagttgggtgctgagtctcccccacgcatgcaggtagatgtcagtttactgttatcttattctgagagagcttctgccacgctgccccttagatatgccagcctgagaacatcatggtcataagtggatgatgaaactccttgtgggccttaccaaatccctgttgcccaggatacagctcagatatatcaactcacaactgagaaagggctcctctagtcctatgtgtagccaaagttcaaagtcaatgctacagcctttgttgttctccctggaacagtttcatcaactttttttgattgagaaagacttatttttcaagcaggctggtcaattacctgagtatggacagagtatcatactcacaagaccttgtgacttcaaaaacaggcaagtccatagctatgagctgtgcctatgaaacgagggggccccagtaaactgtacacaccttacccagtaggcatgcccattcttcttgcttttgaattgcatagatagtccaaatcaaatatggtgaccaacttgagactcgtggagtgagtttaaaaggcaaaagaattgctttcactttgcttttttttttttttttttttttttggtacgttatctgtgtgacttactttagacagtggggaggacattagaatgaacagtcagaagacatgtgctcttgcctgactccgacaactgtggcccctcatccatcttgactgctagagtcctctcttatcaaatgataagagcagatatttcccaggaacacatctagttctagatgtttagatggcccatgtcactctcctctgtttctccagttttgcttgttggtaccccagttaggtgtcatcccttggagccagcacccactctgttcactatttctgctcctgagctcttcagcactgtaacttgaatttaggagaaaaaatcccaacagagtataatgctcaggtttggctttgtttctgcccaccagagactccagcatccccaggaaaacacccgctgctgaagaggcaggcacggatggactatagctttgatatcactgctgaagacccttgggttagaatttccgactgcatcaaaaacttatttagccccatcatgagtgagaaccatagccatacaccactacagcccaacaccagccttggtgaagaggatgggacacagggctgtccagaggggggcctgtcaaaaatggacgctgccaatggtgctcccagagtttacaagtcagcagatggcagcactgtgaagaaggggcctccagtagccccaaagccagcttggtttcggcagagcttgaaaggtctgaggaatcgtgccccagaccccagaagacccccggaagtagcctcagccattcagcctacaccagtttctagggacccaccagggccacagcctcaggcctcttcctccatcaggcagagaatcagctcctttgaaaactttggctcctcacaattgccagacagaggagtccagagactgagcctgcagcccagctctggggagaccaccaaatttccaggaaagcaagatggaggacgattttctggtctcctgggtcaaggggctacagtaacagctaagcacagacagacagaggtagagtctatgtccacaaccttccctaactcctcagaggtcagggacccaggtttgcctgagtctcctcccccaggtcagcgacccagcacaaaagctttgtctccagaccctctcttgagactgttgactacacaatccgaggatactcaaggaccaggtctcaagatgccaagtcagcgggcacggagcttccccctgaccaggacccagtcctgcgagacaaagctgttggatgaaaaggccagtaagctttactccatcagcagccagctatcatctgctgtcatgaaatccctgctgtgccttccatcttcagtctcttgtggccagatcacctgcatccccaaggagagggtgtctccaaagtcaccttgcaacaacagctcagctgcagagggttttggtgaagccatggcctctgacacagggttctctctcaagtgagtgtctgtgccctgcttgatctccactgcccccatttttctattttatatagcatttaaacatttctcagacgcactggttaaaaagatcatttcatctcatgtgtgtgtgtgcatgcagatctgtgtgcatgtgtgtatgtacacatgtgcactggagttctgtcttccatgttaagaagtagtttacataatagccgaccttggctgggatgagaagtgggggatatgttcaggctcttggtaatctgctcacaaagatacaggaggcgaatgaaaagtccaccttcatcttaaggagctctgggtgaggccagggaatgctccccagtaagaatctgtcttgatcttcacatgggcctaggacctgggcagtgagtaggacatttagtcttgtttcagctcagcctctaactctaggagcagagtcctggcttgtacagctgcctccctctttaggtaaagtcaggaggtaggtgagaccagcttcatttttgtgagggctagtagggggtccaaggtcttctgctgcagggctgggtctgggttttccctcttgaatcagctgtgatttatttattgtttgtgctgctgagagtggatatgtcataacagagttcccaaatagcatgtagctaacagagcccctggcaggatagagttgataaaaaatcttgcaacagagaaaccctgtcttgaaaaaaaaaaaaccaaaagccaaaccaaaccaaaccaaaccaaaccaaaccaaaccaagcaaaccagaaaaacaaaatacccccaaagaatcttgtttttcacaccgtgttatctctgcttgtgaaagcctttcagagctgagagaatattcagaaggtctcacagagcccggggaaaccgaggacaggaaccactgttcttctcaggccggccagtcggttatctccttgctgagtgcagaagaactggaaaaactcattgaggaagtgagagttctagatgaagcaacattgaaggtaggtttcctgcatgcacatctgtagggacaagggctgttgtttgtcatcttagctgacccagaggggaagtagctaaagaagtttacggtttgtagcttaaggtttgttatggtgttggctggcatcaggacaggttttgtcctgtcagtggtagagggacaccatgtcacttgacatagcaagtgttaacacctgattttagctgggatgggaagtgtttgtgtgtgtgtgtgtgtgtctgtctgtctgtctgtctgtgtctgtgtgtgtctgtgtctgtgttttggagggacatggccaggccccttgtcctggcatcctttgccattttatggctgagaaggaagatccatggtcacagagccagggtgctctgactctaaggtcatgccaagtgctatgccaacatcccatgggctgctaacctggcatgagtgtccagagagagaacccacatggtgtagcactgccagtggtgaacagcatagacgctttggttatttcctctgcccacctcaaggtgagctcaggagggtctgtgtgcctcagccacatcatcccgaaaggtccacttcccatgtagtcgctgagctcagccaatggtgtgtatcgaggaaatggcccaaccagagctggagccagcagtcaggaggtggccttgtgaatctcactctctggaaacctcttaggctctgtaccctgtacctgaactgggataatgaaaactgggaagcaaggagtccatttttactggaagaattacagctgcccttccaaggtcaaaggtgtggtagtaaagtctgatgaacccatggtaccttggggctgtggtttctcaacccagggtctcactaatcacttgtagcctgcatgagccattgatccccagagcctgagtcaataaaaataatatgctggaaggaaaacttcaagttcagagctgcctatctaaagggtcagtaagaagactttgtttctagtatggcaaccactcacaggagaaataaacacacacagacacacacagacacacacagacacacacagacacacacacaccccaactccaaataacctgatataagtgggtcagtgtgggttgatgggaccttcaccctctggtccctcctctgacctgggatctccacattaagagatggaagaagacctgcaagtcagggactctggtagctcacagccaatgaactgctttgccatgtttttatttcctagtgccatatacaaactagtggcccaagagctatgggcctgaaaataaaatttactggatcttttaaagtgtttggttgtcctaagtcctgctatttctgagtgttttgtttaaagggaatgagccagtagtggcaggattgccttcctctgaggtagccaatcctagtatgcagatgtgtttggcctgccctctttgtgcctttcactcatgcctgtccaccttgcccacgtatgtgacctccatcgctgttgtgggcactggggctccaggattcagcttgagagtagaatgggagcctctgcctttggagagtgtgagaaagttgtcctggatcctgactgggagtttctgtttgtgcctgtttcacatttgtactgcatgtgtgacagagcgagatgccaactgggccctttactgctgctatgccatggaagaaggagcagccagcacctgtgaaacagcgctgacctctgagaggttgacccaaagcctagcaccggcccttgtctcagaatgccatgggaaagtggcatcttccagcctgcagggctctctagctgactttgcaatgtgcagtccagtctatgggaagtgggtgtgagtgggtgagtaggagcagaagagagcgggcttgctgttttacatacatttgtttaccctcgtaagcttcctgtaattcctgcgcgatgaaactgaagtctgaggaggtggtagtactggcccagctggtgtttaataaaacaaaccagtgtggtgttaaagcatgtgttaaactgttcacgttgctgcagtactgtgtttgtgaatgtatgtattttcatccacagcaattagacagcattcatgtcaccatcttacacaaggaagaaggtgctggtcttggattcagcttggcaggaggggcagatctagaaaacaaggtgatcacggtgagtggcccagggatgggcacattggagccagtgtgggttgctgggggtcagaagacttgcctgaaagaggtcttgtgcaggggaacaccaggccactgggcaggggtcaggacaggaggtgtaaaggaaagtcattgtgaccatccttctcaagaggcacagtatgggctcctctctgatctgcatttaaccctcggcattatatgcctttaacaaagaaggtctctgtgcacccagagcagcctcagttcaccaacataaacaggaaatgcacgtgaagtatcaaaaatcattgtgtgtatgtgcacatatgcacatgtgtgtgcacacacatgttctacattataacatcttaacagcaagtttgcacagcttaaagccctcatctctgtaattttgaacatctgaattttgtatgtagaggatatattaaaaatggagatcagaatcagggagatatctcagtaaataaagcacttgctttgcaagcatgggaagttcagtttggtgcctagaattcacgttcaagcaaagctgtacatgggagtgcatctgtaaccccagagctggggaagcaaagacaggcagattcccagggcttgatggtcagtcagcctagcctacttggcaagtgctaggctagtgagaggccatgtcttaaacaaagggaatggtggatgcctaagctgtgacagctgaggttgtcctctatggctcccacatgtatgtgcacatatatgctgctgtgagcacacatatgtgtctatacacctgggtgaattggggacagctttggtacaatatcacataatttcctctggaaattaagaccatggcagtcacaaggatttagataggtccagtttatggtcacagggcacatttagaaacctctagtcttggaatgtagacttccccacactatgtaaagaggaacccatgaaagggaacttattgaaaggaggaggctattctccttttacctacttgaagaatgagaatgttcaagtggacaactgataactgggaatgttcaaatgttcaactgacttgttggttagctgagctcggtaggatccagccaaggaatagaagacatttctgtgcaatgtgcaggctacacataccacagtgctcacccagtctacagagcctatgcctagtcccctgtttttcaggccctagagtctgggagagtacagggaggtgagcagacctctattctaagcatatttctctagactcctagtcatatctggcctagtcgatctgaccagaatgggctactgtcattagcccacagcttctggtcaccagtggctgactcacatggtttctggcccccctgagttcatgattcaggctattcgtgtggcgtggatctgggaatcaaactcaggcctcaagtgtggtggcaaagcactgttcctcactgagctgtctttctgactgtaagatggtttttaatcctgttcatcatgcagaaaggagaaagggaccagctagagaataagggtgtctaggcagcctaggatagtgtacctcaagtacttccagtagaaaatggggcatgaacatctctccggaagggattaactctcctgaaatgcaattgggagtcaccatgttattacattgcttactcagagaaccaagatgtaaactggcattgtaggattgctagcatctctaaacaatgaacatttttggagcttttctttaaaatttgagtgccaccaaatttctttgatcttagaaacctattctcataaatatccctcaataagtcctagagtcagttttcccaggaaaccattctcagaaatgtgctctagtgtaggtaaggcagaagatgttcctgggagtggctggggttataggagaggtcaagggtattgtgtgggaagagtgcagagtactcactggccatcactgttggtggtctctgccctgactagagaaggaaagggagggatgctggccctgtccagttgctctgccctgagatgtattcagtctgtgttgtctttggcctaacctcctctgggggttagttggatacctgtctcagaggcctctgccagccctcccagcacaaatagggatctgaattgggtggtttgtggctcctgactccttgatcttcttcaggttcacagagtgtttccaaatgggctggcttcccaggaaggcacaattcagaaaggcaacgaggttctttccatcaatggcaaatctctcaagggcgctacccacaatgatgccctagctatccttcgccaagctcgggacccaaggcaagctgtgattgtcaccaggaggacaactgtggaggccactcatgacctgaactcctctactgactccgcagcctcagcttcagcagccagtgacatttctgtagaatctagtaagcgttcccagtgcagtggggactggtgtggggagatgcgccttttgaggtacattctgtctttggccatttagatccatgcttggcagcactgtgtggtaatgtgtggttcacatatcacagcttcctagcatgcttggtgcactgtagagatgagtgtgtttctgcatgagtgtgtgctcgtgtctgtggtgtgtgtgtgtctgtgtgtatgtctgtggtgtgtgtgtgtgtgtgtgtgtgtgtgtgtgtgtgtgtgtgtgtgtgtgtgtagttaagcagccagcatcagcctgggcagctgagcctgagagaagaacacaccactgacctagcccacgtgctttcctctgcagaggaggccactgtctgcacagtgacactggagaagacctctgcagggctgggcttcagcctggagggaggaaagggctccctgcatggtgacaagcctcttaccataaacaggattttcaaaggtaggctccttttttttctttttctttcttctgtacattctctccacttgcgactatgcagcaaacacctcccaaaccgagaacctttttggccatggtgggttcccacactctctttagtcacgtgttgattcctgtgtgttcagttctgcttttgtgaccttgtgccccttttcagccctgccctaacttctctttttattgggttctctcccgtgaccgaactctgggcttggttctgcttggcaggaccaaggttaggaagaggcaagtaaggaaggccctcacttgagctgagaggcaccaaaagatgcactgagagagatcaatactgttcccatgcaatgtacttaaacatgatacagctgtgacaggactgaggcaaagacaagacaaccaggagttcgaggtcacccttggaagtcaataaacagttagcctgggttatatgagtgagtctgtctggaaccaaccaaatgatccaggatgcactgagtaaagccagaggctggcgtttgtctgatagcctggctagatttaccctagctctggattcatccattcttgtgtttattttccatttgatgtcttatctatcatggatggggctgcccaataatgacatgtgagtcagctggatatggattttcctgagaaaattatgaatgccttatagctaccatgcaaatatatctgcaacactttgccacttcttagctggaagccttaggcaagggaacagggatgtgcacaaaggcacagctgaaggacctgggttctcatgttaagtttgcaatgcagagtggcaagtcactaatgtgggcccatgcacaacacacgggaatgagtctccagccataggcaggcatggtgccatgggatgtggatgccagagactgcaggacagagttcaaactgagatcctacgactagtcattttcaagctctaagtaagggtctctgtctttggtttccatgctgtgaaaagggaatctattattgtgtatccccaaggaatgctgccatgggtacagaacaccagcacaacacccactgcattgctcaatagcccgaactatttttcattaatattctatactgttattcactattggttaaggccagggtgtcgaaaatggtgtgtgtgtattggggggcgtgttagggagttcccttcaatataaacagtaaaggaagattttgtgatttctgtatgcatctgtgacagagtgggcaccatgcagggctatgagtgcatgcagggttaggtctttccgagaggatacagagttcttcccaggctgtttcaagccaaaagccgtgtgaagattgcttcacaaatgtctcagcagcgcacacctcttcccacctgttgccgatgatgtcactagaagcaggttgtcaacgtgaatcagggagtcaatagagaggttcagggaggacacagaacaccagaggttctctaggaattatggaagtctctaaccaggctctggcttggcctgccatttcctcacttaaaaatggcatagattctcttgtctactttagttttctatgccccagagagatgttcctggtggccactgtgtgttaccatcctgtgaaatgcttcactttagaatccctcacacgctcccaaagatgggtgtgctatccacttgtgaacttccctggttccccagaaagtgccttttattgtacctgttacccataaagcccaagatgacctgtcatcttcttctttatagggacagaacagggtgagatggtgcagccaggggatgagatcttgcagctcgctggcactgctgtgcaaggtcttacccggtttgaagcctggaatgtcatcaaggcattgcctgatggacctgtcactatagtcatcagaaggaccagcctccagtgcaagcagacaacagcttctgcagactcataggcaggcggccaatgctaagacaaagcaggagctggaagctccagtaatcgctgattctcagggtctctgctgcccacctcacccaggctggggaaagcccaggtgtgcctctggtagctgctgctcaggtttggacctcctggcacactgcccatcaagagggctgttccaaatgtcaggacagagtcacgcagaggtggctgttacgaaccacgtcaactgtatatagacagcttagtgataataccctggtgccgtaataaaatggttgtattgcagtttcccaagaaacaaatgacctgatttggaaatcccctagggactatgaaagccaccccatggcagtgcttttttttttttttctctcatgcatctcatgtcttggaggggagctccttactatcagctcgagcaggtcaaggctgggctggggtcctgtgaagggtcactgcttgtggctctccccagaggggctggctgatgactggggaagtttcttcacggctggtgcttctgcaccatgccgattgattctgcaccacactgcccagccacaccacagtcaggtgcgggtgcatcttttaaatgttctgcctttgaagactcataacattgctcctgtcacactcctgccgagagcaggcaaacacctgcctgggtttaaggaaaggggataagttgttagaaacagctctgtgagatgcagcctgccatgaagaacacattcaaacacatagaagactttttggttgggtcgagagcctagaaggagtggaaccagaagacagagggtatgagcataaaataaaattattgttaatgtcttatctgtcacgtgtcaggaaccctgcttggtattagatgatagttattggtgatcacagccacttcaccaatggcggtcctgcaccaatgtattggagggtactgagcctcagaacaataaacagcttgtcaggctaagatgtggaagggcagaggtttagtcattccttcagtgacatgagcaggcccaggagattgaaaacatggcacatcagggaataaaaacaaacaaacaaacaactgcttagcatgtctgcagcatgtgcatggccagtatatttgctttggttatttctgaacagcggatagccaagctcagggcaactcactgtcactctcaattatccgcagcagatatagctttcaccaggtctgggccaggggttcagatcctcaatcattccatgaaatagagatgacatgggaaggcctggcaagggtcacagataaaacaccagagcccatttattttagggccttgacaatggaagcttgctactatatataacttgctggtttctccataattggaagccagaaatatttgctggaagtggactcagagaccccagctggatcctctcttcaggaaaagcccttcagtgactcttcgtggctagctcggcctcacttactctgaaaaatgacagcatgttactggagctgacatgcttgcttctccagtccactctgagttctgtcctatagcagacaagtaaatgaggaactcaagataccatttatatcaatctatcaggtttaatagaaggtacatttgatctaacaggagaaggtatggggccggggggaacagctgtcagtaagtaaaatgcttgccatgcaagcatggtcacctgaacttcatctccagagacaagaagaaaacataaataaaaccaaccaagcaaccaaccaaccaaaaagaaaagaaaagaaaagaagagaaaagaaaaggaggaaaaaaagaaaagaaccagatgcggtggcattcaaagtgtaattccagacctggggaagcagaaagatactggtccctggaattgttggtcatccaatctagcctatttggtgagtcaaaggccaatgagaaagctggtctcaaaaatcccaaggtggatcacatcctaaataatggtatagcaagtgagtaagcttaatatggagacaaaaccagagagagagagagagagagagagagagagagagagagagaaccacagaaagagatcagcatccaaaccccaggcaacagggcagcagcaagaaaacctgacagatctatagagattgcgggaaattctgaacaagccccgtcaaaatgaagctgtgtcctaatgagccctttgactaaatccaagctgctccaacaacagtgagaagaacaaaggtagagagagtaggggaattattaaaattattaaaagctactagaggggagcagctggactgtgagggtactgtgtctctgaagacagtgtcagtcagcagagatctttcctttctccatctgatggaaagcaaggatctaaatttatttggaaagctaaagagaaaccctttgtccctaaaggaatggcagaccttgtggtcagtgtcagatacaataggcgtgcatacttgcacagcatagcagacattcttccctccttcctaatggcagcaaagcctgaggggccaggagtccccagcattcttgcctcaccatgatgactgagggcacagtgaggtacatgccatggggctcacctccccagagtctagcatgcacacaggaactgctggccctgcctagagtcactcataggggccacaagaattcacactccttcccaaagatacaaactggcctgaggcagttacaagccggtttcatggggatgtgaaccttaacccacaaagggagaaacagatagaaagagatgattctgatggaagagatcacaaacggtagattgaaagtatttttccttaaggcttatcctgtggtttaaaacatcattttccaagttgacacttttgtaaagagtgaaagtcttgtgctaaaaatttgtatacaaaagcatatccagaaagggaacacaggagtctgggaactccagatgccagaggaagcaggacttagcgaccacaatggatgatgattctttaagacccacacagggacaaggtgtcttacagcaaccagcacacagggctctggaccacaaggaatcaaagagtacgtgagccatctctcaggtggccatagagggacttgccctggcctgccaggcctatgtgtgcaccacggcaagctagtggttagctccttccacaccaagcccaagaggacggagggtggtgtggggggatgggctgctcctctggaatggaaccctgagatttgctgttaactatggcatctcaaaaggcctcagcagctcttccgtgtcctttgaggctcaacagctggagttcctgaaggaccataggcaatccctgccaataggcgactgtcagtgatggaacttcctcactgccttctgaaggttggggtagaactcagccatgcttcgagggaagaaggagtccaccacactctgagggaggtagccactcaggtctgtctgaaagaatgtgaccaggttggttttgttgggatccctgaagaaatagcagatgcgggttagatatgtaccatggaagcatctagctcagagccatgaccagcagaagtggtccagacatggtggtcacttctactcctgctctagattcagtgcccaggactcctctcagcctccttgttgtggatgatagcatagcctctaggggacacacggcacagttgctacaaacacattggggagctggtaggacagctaggtgcagattctccttatggctactgacagcccatccccccaacccctcctgggctttgtgtataaggagctgtctatcagtttacccctgtgcagagaaagacagccagaaggaggaggggaggggaccagtagggagagagggaaatacagaggcagagggaacaaatcctccgtcagattccatgttctctctccctccccacctcccactgattctggggtactttctctgcccatacgccacccccaccctcaccccaagctcaagctatccctcatagtcactcagctgtgttctctttggaaacttgaacagataagtaagaaatctgagttagtgactatgtttctctctggggagccctgggcttgatgggagaacatcacagaagagacaaaccacgtggggaaagacacacagagtaagtaaaagtggataaaaggggcctcagaggcaccacggctgtctttacaggaaagccaggagtttgcctgacatactcatcagaatacatgcggaacttacatacatacagtaggcagaacacagagaatgctccctgcatacagtaggcacatcacaaatgcagctctggtgctgcctcctccacagactctcctgccctctgagatgcttttcctctgtcacagatagtctgagcccagacacctcagatctgatctgaacacagtcttgctccccagtgtggcctcttgccctgactcacagctccttctactctgggcacaaagcagtttacactgaagtcatggcatggctgctcagacctctctaaagctcccaaaatgtctagaggggcctggccctgcttcctcaatgatttcttctagcctctcttctggctccactgagccaacacagtggcttcctcccatgccagtcctcttgtggccacaccctctcaccaagaggaaccttgcacctgcacaggccactgtgccaatcgaggctccaaccagggggattttggtgatctgtgcggtgactcactccgaccagaccccaggtcctttcatcatcctttagttttctatacagcacttagcttgtagtaagcaatgtctagtgtatgtataacataatttctttaatttgtgccttgtttatcttctcccaccccatcagaattaagcactcagagaacacatgtcttttatctgttttttaaaaaagagaaaaacaaagatagtcaacataaaaaccacctggccgggtttaagtgtggctttttacttgttgggtctattcatggtcttggggtagctacttaacctctctggcccacccatccctcttatagagcttgtaccatcaccactgttacatagcctgaagcttgcagactgtgtgttccccaagccagccctaagcctcagcttcaaggagaaacggctcttacttgtctagaccctccttgaaatatgcccggcagcctggaagggcaaggcaggtctcagcatctgactgttgggaacatggcaatgaaaagtggtcaagggtagttttataggcccacatcagagggtctggtctcctctgcactgggaataaagttgtgtgtgcgcgcacgcgtccatgctttaccactgtcaaactcaaaaaatttgtgacatttaagaaaagccttcccagagctgtttggagagccagattagcagacatggtgttaggtgggggtgctctgtctgggttttagtaatctaggcactgagacctgcctcctggaactgtgtggggaaggccacaccttcccctccggctatgtgcagggacccatgagcaggtgcaatctctctcactgttaacttgggtgctgctcattataaacctggggccttagggtaactcattacccagagagctctcaggaaaaccctggccgtatctgtgagtgatttagggctcttgggcttctttccagggccgattcacagcatggtctcagaactatcctccatgccctgagatctgccgcctttcttgtacaggaaggtggtcgctgcgtgaacatagggtggggaatttgttcttggagctactttagtctggtggatatcttcagagagtccagaagacctggagctcaggcagtacactgcgctcctggactttgactgtggacgcataacttaactgtcctaaccctcagcttgcttatttgcctaatggcactgggacatttgcctgacctgtcctgtgaggctgggcacctggtggttgcacatgcctttaaccccagcacctgtaggcagatctctgagttcaacaacaacaaaagctaaatccaggtaacacctccttacccctctgccaggtgccaccaagagtggcacatcatgtcatgcaagcctatgtgtgacagtgcattttgtaacattgatattatttttgtagattacagttgaagtgcctgttttctgagttcacagtggtgttatggttgggtctaagacaaaattctccacccactttccttaccctggcagtggttcacagaagcacccgcatggatggttaaatcctctcacaaaaccgggctttgggggacacaatggatgttccacatgggtagctggaagacagacatgaagtcagtggactcacctgcagacagcagggtctccaccgccagcactgaagatcctgcgcctgcacaggccaagtgcctgaagcccagcttcccagtcaacttccttccttacatttacactcactccagttcacacccgtgcatcctcaccccaatcccccacacccccacacacatgctcagatacacgcacacacatgcactcactaccacacacagttttctccaaccctttaagaatttgggaagaaagaacattccagaatataagaagaaagactcctcgctcagatttcagcccaaagaaaggaggctgtgtccctcaccttccccaggggcagatacagaggaatgactggactctgctccccagaaggcaggaaccccagaaagcaaccatatggttagatgctcccatgacttgacaaactgacttacaaagagattagctgctatctgcatgtccacagcacaagctgagatcagcagagataaaaacagcactgacaaaaatctgggacacacatgataaagccctggtatgtggtctccccattttaaaccctatggcacaaaatctcaactcgacaagggaagaggatgggacacaagagcttgttggtggtttccaatcaccaagctttccttgaagatctagggctgcgtaagactgagcccggcatctaggccagccagtgaacacctactgccacttaccattggagctgatggtgccatcctcatacttcttcaccagcaccaagtccacaaagtccctgggagaaataagcttcatggcagctgagggcgtggaggttctgctcacacacagcatctgtcaaaacaaaggaggctcaggtccactgacgacaagtccacctcatacccagcatctgggaaacgaagtgcgtgggcaacatggggagctgcaagcaggacggaaggaagcctcggggcacttgggctctttccagcggctgcattgaggccaaaatgatttcatcgctttccaaacaatttcatctccatgtttctttataaaataactcacctgagaacagtgtccctacaaaatgggcctcctcccccacccatctagtaccatcctagcttgcagtgcccagggtacaagatctcttggggtgctacagatcttcaggaattataactgcaatatttgaccatggtgccccatactgggctcagctcaatgtcagtttccctttcttaggcacagtccaagaaacaagtccatttctgaattcctgtatctcgctcgcagcaggcacagtggaagtaatggccatcttctacaaccataaccatcttctggttccatctggagcctgaaggaaaagtctaattttaagaatattgaagacagaagcacttgttagagacgtgagcttactccgggttcatgtctcatccacacatcctttcctttacccatcttctattaagaattaggatgctcgagggctgtccaaatcacgctcacagacactgtctggaagggtctttgcccccttaccttcaatgtttcatttagtagacaggacccagacttgttactggagtctctgcttttcaggatgtgtaagtcccctggcagtctgtgctttctctccctctgtgcctagtgtccactgaagagtgtgtctctctggcaacaagccaaatctcttcatgggcacatgaattaatgagaaccaagagttcccacatatctcatgcagagataaaaaaaaaattcttttctttttgtgtttaatcattcttcatccaaatttctaatgttacctcaataaattacactcatacctcaatctagtacttaaaaaaaaaaaggcctgtgatcaaaagaagtacatgattagaacagtatttttaacttataagaatatctctaataaaatttggtgatgtccaaaaaaaccaatgggggcaaaaatggactggaaggccaggcctaatggggcaagcttgtacttgcaaggcagaagcaggaggatcagcctggtctataatattgagttccaggccatgcagggctacataaagagaccctgtcttaaattaaaaaaaaaaaaaatcagtgggctatataaagcaaagtgcaagaaaaataattacatactgattaagaaaaacgtacttcctgttggtggcttgctttgtttattgaatcaaaacacagccctggccagcctggtgttcatggtctggctgactccaactcccagatcctcatatctccatggctgctgggattacaggtacgcagcaatggggaacttttgtttaagtactagactgaggtatcagagtaatttattaaggtaacatgattactttccttctggcttctttgtctctgtgcacttggcagcttctctttccctctgtcagactgtttcttcccccaggtttcaggatagggagcttgtggccaggaacagaacacctggtaactgccttgaaagcactgacaggttagccattgttatggctgctcaggtgtcagcctgtggatttcctagcttttcattctgtcccaccagccactgtgctgacaccaagaggggtgagtgtgctagagaggtggagccactttagtttccaaaagatgacctgcagggctctgggggcagcttagtgggtagtgcttgctgtgccagggtgagaagcagaacttaggttccctagaacccacacacaagctggttgggagtgttagttcagctgtaatcccagaagggagtcagaggcaggggattgctggagtaagctggctagacctgtaagctccagactcatcaagagactttgcctttaatccccacactcaggaggcagaggcaggcggatttctgtgttcgaggccagcctggtctacaaagtgagttccaggacagcctgggctatacagagaaatcctgccttgaaaaaacaaacaaacaaacaaaaacaaaaacaaaaacaaaaacaaaaggtattaaccaagggctgctcaacttcaccatttatgcgtaatgatttgtatacactctttgcattgtttatttttttcttttctgatgctggtttcacttaatccagaataagaaaatcctatcaatttattgtggtttctcaaatgtttccacttagaccagctggcttttataaaggaagttatttaactgtaaatggggaaaaaaatgaaagaaagaagaaagaacaacttgtcataaattaaaggtaacttcaaattacacgcggaattgctagagtcagattcccagcccagggcgccgattcatctcttacggggaaagcaacagctaaatagtatccaaggcacattagtgcctgaggttcactctcctcttcttggtaccagagggctgaaagaagagttgaaacacggcatcatcgtcaccgtgtgtttcagttctgtctctgacataaactcctatggataacagactgactgaaatgaggattctgggtcggagcaaagacacctggctccacagcttgcaaaacactgcaaggtttcacaatgcaacctgcttatgtaagcaccagacatgatagcgccagacagagcctagaagccaacactaagatgccattcaaaccacataggtctgctcacccagagttacttgcacatctgtttccactgtgattttctattcttctgagttttctatagtcaaaaatgaagcaacgatcttacagttgtaggtgatgccaggacaggtccatcaagatcggagctgtctcccataacacttcctacctcacgtggctatttgaatttacatttatatttgttaaaatgaataattcatttcttcaaaccagccaccttttcatgctctatggccccatggaattgaggctgccacactagacaaggcagttggcagagcaacgttgctgtatcccaaggctttctgctgggtagggctggtctgcaggatgaacgctttcctgaaggagacttgtagtggtcccgctgtgggcaaaggaccaaagtggctctgttaagagacaatgcttcaaactagatctgttggtgtaaatccaggcctgcctctttgtctggggaggccaagccttgccctgcaattcctcagctatagtctgtagattctgctgagggtttcttagtctctcagagacacattgtttcctgccagggacaaggctggactcgtctgcatggcactcctcttgcctacagatgttatagatccctcttcagagaggtggggtcggggtgttgcagcaagacaagacactacagataacacagccagagacacttacatccgtgatgctctggacaatttcaaagctgctcacattatcatcccacttctcccggaggcccgaagcaactggctttatgcaatcccacacctcttctggtgtcccacacagaatcccttctcctcggtacctagaatggagaggaatttgatccaccgagtcaattaaacttgtttatcttaggattttatctc

SEQ ID NO: 12 - DNA, 2062 bp, Mus musculus
ctgaagaggcaggcacggatggactatagctttgatatcactgctgaagacccttgggttagaatttccgactgcatcaaaaacttatttagccccatcatgagtgagaaccatagccatacaccactacagcccaacaccagccttggtgaagaggatgggacacagggctgtccagaggggggcctgtcaaaaatggacgctgccaatggtgctcccagagtttacaagtcagcagatggcagcactgtgaagaaggggcctccagtagccccaaagccagcttggtttcggcagagcttgaaaggtctgaggaatcgtgccccagaccccagaagacccccggaagtagcctcagccattcagcctacaccagtttctagggacccaccagggccacagcctcaggcctcttcctccatcaggcagagaatcagctcctttgaaaactttggctcctcacaattgccagacagaggagtccagagactgagcctgcagcccagctctggggagaccaccaaatttccaggaaagcaagatggaggacgattttctggtctcctgggtcaaggggctacagtaacagctaagcacagacagacagaggtagagtctatgtccacaaccttccctaactcctcagaggtcagggacccaggtttgcctgagtctcctcccccaggtcagcgacccagcacaaaagctttgtctccagaccctctcttgagactgttgactacacaatccgaggatactcaaggaccaggtctcaagatgccaagtcagcgggcacggagcttccccctgaccaggacccagtcctgcgagacaaagctgttggatgaaaaggccagtaagctttactccatcagcagccagctatcatctgctgtcatgaaatccctgctgtgccttccatcttcagtctcttgtggccagatcacctgcatccccaaggagagggtgtctccaaagtcaccttgcaacaacagctcagctgcagagggttttggtgaagccatggcctctgacacagggttctctctcaacctttcagagctgagagaatattcagaaggtctcacagagcccggggaaaccgaggacaggaaccactgttcttctcaggccggccagtcggttatctccttgctgagtgcagaagaactggaaaaactcattgaggaagtgagagttctagatgaagcaacattgaagcaattagacagcattcatgtcaccatcttacacaaggaagaaggtgctggtcttggattcagcttggcaggaggggcagatctagaaaacaaggtgatcacggttcacagagtgtttccaaatgggctggcttcccaggaaggcacaattcagaaaggcaacgaggttctttccatcaatggcaaatctctcaagggcgctacccacaatgatgccctagctatccttcgccaagctcgggacccaaggcaagctgtgattgtcaccaggaggacaactgtggaggccactcatgacctgaactcctctactgactccgcagcctcagcttcagcagccagtgacatttctgtagaatctaaggaggccactgtctgcacagtgacactggagaagacctctgcagggctgggcttcagcctggagggaggaaagggctccctgcatggtgacaagcctcttaccataaacaggattttcaaagggacagaacagggtgagatggtgcagccaggggatgagatcttgcagctcgctggcactgctgtgcaaggtcttacccggtttgaagcctggaatgtcatcaaggcattgcctgatggacctgtcactatagtcatcagaaggaccagcctccagtgcaagcagacaacagcttctgcagactcataggcaggcggccaatgctaagacaaagcaggagctggaagctccagtaatcgctgattctcagggtctctgctgcccacctcacccaggctggggaaagcccagaggtggctgttacgaaccacgtcaactgtatatagacagcttagtgataataccctggtgccgtaat

SEQ ID NO: 13 - protein, 626 aa, Mus musculus
LKRQARMDYSFDITAEDPWVRISDCIKNLFSPIMSENHSHTPLQPNTSLGEEDGTQGCPEGGLSKMDAANGAPRVYKSADGSTVKKGPPVAPKPAWFRQSLKGLRNRAPDPRRPPEVASAIQPTPVSRDPPGPQPQASSSIRQRISSFENFGSSQLPDRGVQRLSLQPSSGETTKFPGKQDGGRFSGLLGQGATVTAKHRQTEVESMSTTFPNSSEVRDPGLPESPPPGQRPSTKALSPDPLLRLLTTQSEDTQGPGLKMPSQRARSFPLTRTQSCETKLLDEKASKKISSQLSSAVMKSLLCLPSSVSCGQITCIPKERVSPKSPCNNSSAAEGFGEAMASDTGFSLNLSELREYSEGLTEPGETEDRNHCSSQAGQSVISLLSAEELEKLIEEVRVLDEATLKQLDSIHVTILHKEEGAGLGFSLAGGADLENKVITVHRVFPNGLASQEGTIQKGNEVLSINGKSLKGATHNDAILRQARDPRQAVIVTRRTTVEATHDLNSSTDSAASASAASDISVESKEATVCTVTLEKTSAGLGFSLEGGKGSLHGDKPLTINRIFKGTEQGEMVQPGDEILQLAGTAVQGLTRFEAWNVIKALPDGPVTIVIRRTSLQCKQTTASADS

SEQ ID NO: 14 - DNA, 4987 bp, Mus musculus
ctggtagtgcagattactgtgtgctctggcctctgcaattgcagagagaagcaaagacagtgacatcctgaagggctgtaccagcagggtcagggactcatgcagtggcagctaaatccagttcatctgtcactcaccggccaaggcctggagaacaggagaggaagaagcgtggcctcacttcctctctgaggatggaaccccacggccactccggaaagagccggaaatccacgaaatttcgctccatctcccgttccctgatcctctgtaacgccaagaccagtgatgacggctccagcccagatgagaagtaccctgacccttttgagacttcactgtgccagggcaaggagggtttctttcactcctccatgcagctggcagacacatttgaggctgggctcagcaatatcccagacctcgcactggcctcggactctgctcaactcgcagcagctgggagcgatcgaggcaagcactgcaggaagatgttcttcatgaaggaatcttcttcaacttcctctaaagaaaagtctggaaaaccagaagcacaaagtagcagcttcctgtttcctaaagcttgccaccaaaggacacgcagcaactccaccagtgttaacccctacagtgctggagaaatcgattttccaatgaccaagaaatctgcagctcccaccgaccggcagccctactccctctgtagcaacaggaagtccctctctcaacaactggactacccaattttgggcactgcaagaccaactcggtcactgagcacagctcagctcgggcagctgtctgggggtctgcaggcgtcagtcatctccaacatagtgctgatgaagggccaagcaaagggcctgggcttcagcattgttggaggaaaggacagcatttacggccctattggaatttatgtgaagagcatctttgcagggggagcagctgcagctgatggacggcttcaggaaggtgatgaaattctggaactcaatggtgaatcaatggctggcctaacacaccaggatgctttgcagaagtttaagcaagccaagaaggggctgctgactctgacagtgaggactcgcctgacaacacccccttcactatgcagccacctgtcacctcctctgtgccgttccctgagctccagcacatgtggtgcccaggacagcagccccttctccttggaaagtccagcgtctcctgctagcactgccaaacccaactacagaatcatggtggaggtgtctctgaagaaagaggcaggtgttggcctggggatcggcctgtgcagcatcccctacttccagtgcatctcaggcatcttcgttcacacactgtcaccaggatccgtggcacatcttgatggacggctgaggtgtggtgatgagattgtggaaatcaatgattctccagtgcactgcctgactctcaatgaagtctacacaatcctgagccactgtgaccctggcccagttcccatcatcgtaagccgacatccggacccacaggtttctgaacagcaactcaaggaagctgtggctcaggctgtggaaggcgtcaagtttgggaaggacaggcaccagtggagcttggaaggtgtcaaaaggctggagagcagctggcatgggcggcctaccttggagaaagaacgtgagaagcactcagcgcccccacatcgaagggcccagaagatcatggtccgatccagcagtgacagcagctacatgtctgggtcaccagggggaagtccctgcagtgcaggtgcggagccacagccttctgagagggaaggcagcacacacagtcccagcctgtccccaggggaggagcaagagccgtgcccaggggtcccatccaggcctcagcaggagagcccaccccttcctgagagcttggaaagagagagccacccaccactgagactgaagaaatcttttgagattttggtgagaaagccgacatcctccaaacccaagcctccacccagaaaatactttaaaaatgacagcgagcctcagaagaaactggaggagaaagagaaggtcacagacccttctgggcacaccttgcccacctgcagccaggaaaccagagagctgctgccactgttgctacaggaagacactgcagggagagccccctgcaccgctgcctgctgcccaggacctgcagccagcacgcagacttcatcctccacagaaggagagtcaaggaggagtgccagcccagagactccagcatccccaggaaaacacccgctgctgaagaggcaggcacggatggactatagctttgatatcactgctgaagacccttgggttagaatttccgactgcatcaaaaacttatttagccccatcatgagtgagaaccatagccatacaccactacagcccaacaccagccttggtgaagaggatgggacacagggctgtccagaggggggcctgtcaaaaatggacgctgccaatggtgctcccagagtttacaagtcagcagatggcagcactgtgaagaaggggcctccagtagccccaaagccagcttggtttcggcagagcttgaaaggtctgaggaatcgtgccccagaccccagaagacccccggaagtagcctcagccattcagcctacaccagtttctagggacccaccagggccacagcctcaggcctcttcctccatcaggcagagaatcagctcctttgaaaactttggctcctcacaattgccagacagaggagtccagagactgagcctgcagcccagctctggggagaccaccaaatttccaggaaagcaagatggaggacgattttctggtctcctgggtcaaggggctacagtaacagctaagcacagacagacagaggtagagtctatgtccacaaccttccctaactcctcagaggtcagggacccaggtttgcctgagtctcctcccccaggtcagcgacccagcacaaaagctttgtctccagaccctctcttgagactgttgactacacaatccgaggatactcaaggaccaggtctcaagatgccaagtcagcgggcacggagcttccccctgaccaggacccagtcctgcgagacaaagctgttggatgaaaaggccagtaagctttactccatcagcagccagctatcatctgctgtcatgaaatccctgctgtgccttccatcttcagtctcttgtggccagatcacctgcatccccaaggagagggtgtctccaaagtcaccttgcaacaacagctcagctgcagagggttttggtgaagccatggcctctgacacagggttctctctcaacctttcagagctgagagaatattcagaaggtctcacagagcccggggaaaccgaggacaggaaccactgttcttctcaggccggccagtcggttatctccttgctgagtgcagaagaactggaaaaactcattgaggaagtgagagttctagatgaagcaacattgaagcaattagacagcattcatgtcaccatcttacacaaggaagaaggtgctggtcttggattcagcttggcaggaggggcagatctagaaaacaaggtgatcacggttcacagagtgtttccaaatgggctggcttcccaggaaggcacaattcagaaaggcaacgaggttctttccatcaatggcaaatctctcaagggcgctacccacaatgatgccctagctatccttcgccaagctcgggacccaaggcaagctgtgattgtcaccaggaggacaactgtggaggccactcatgacctgaactcctctactgactccgcagcctcagcttcagcagccagtgacatttctgtagaatctaaggaggccactgtctgcacagtgacactggagaagacctctgcagggctgggcttcagcctggagggaggaaagggctccctgcatggtgacaagcctcttaccataaacaggattttcaaagggacagaacagggtgagatggtgcagccaggggatgagatcttgcagctcgctggcactgctgtgcaaggtcttacccggtttgaagcctggaatgtcatcaaggcattgcctgatggacctgtcactatagtcatcagaaggaccagcctccagtgcaagcagacaacagcttctgcagactcataggcaggcggccaatgctaagacaaagcaggagctggaagctccagtaatcgctgattctcagggtctctgctgcccacctcacccaggctggggaaagcccaggtgtgcctctggtagctgctgctcaggtttggacctcctggcacactgcccatcaagagggctgttccaaatgtcaggacagagtcacgcagaggtggctgttacgaaccacgtcaactgtatatagacagcttagtgataataccctggtgccgtaataaaatggttgtattgcagtttcccaagaaacaaatgacctgatttggaaatcccctagggactatgaaagccaccccatggcagtgcttttttttttttttctctcatgcatctcatgtcttggaggggagctccttactatcagctcgagcaggtcaaggctgggctggggtcctgtgaagggtcactgcttgtggctctccccagaggggctggctgatgactggggaagtttcttcacggctggtgcttctgcaccatgccgattgattctgcaccacactgcccagccacaccacagtcaggtgcgggtgcatcttttaaatgttctgcctttgaagactcataacattgctcctgtcacactcctgccgagagcaggcaaacacctgcctgggtttaaggaaaggggataagttgttagaaacagctctgtgagatgcagcctgccatgaagaacacattcaaacacatagaagactttttggttgggtcgagagcctagaaggagtggaaccagaagacagagggtatgagcataaaataaaattattgttaatgtc

SEQ ID NO: 15 - protein, 1306 aa, Mus musculus
MEPHGHSGKSRKSTKFRSISRSLILCNAKTSDDGSSPDEKYPDPFETSLCQGKEGFFHSSMQLADTFEAGLSNIPDLASDSAQLAAAGSDRGKHCRKMFFMKESSSTSSKEKSGKPEAQSSSFLFPKACHQRTRSNSTSVNPYSAGEIDFPMTKKSAAPTDRQPYSLCSNRKSLSQQLDYPILGTARPTRSLSTAQLGQLSGGLQASVISNIVLMKGQAKGLGFSIVGGKDSIYGPIGIYVKSIFAGGAAAADGRLQEGDEILNGESMAGLTHQDALQKFKQAKKGLLTLTVRTRLTTPPSLCSHLSPPLCRSLSSSTCGAQDSSPFSLESPDASTAKPNYRIMVEVSLKKEAGVGLGIGLCSIPYFQCISGIFVHTLSPGSVAHLDGRLRCGDEIVEINDSPVHCLTLNEVYTILSHCDPGPVPIIVSRHPDPQVSEQQLKEAVAQAVEGVKFGKDRHQWSLEGVKRLESSWHGRPTLEKEREKHSAPPHRRAQKIMVRSSSDSSYMSGSPGGSPCSAGAEPQPSEGSTHSPSLSPGEEQEPCPGVPSRPQQESPPLPESLERESHPPLRLKKSFEILVRKPTSSKPKPPPRKYFKNDSEPQKKLEEKEKVTDPSGHTLPTCSQETRELLPLLLQEDTAGRAPCTAACCPGPAASTQTSSSTEGESRRSDETPDGKHPLLKRQARMDYSFDITAEDPWVRISDCIKNLFSPIMSENHSHTPLQPNTSLGEEDGTQGCPEGGLSKMDAANGAPRVYKSADGSTVKKGPPVAPKPAWFRQSLKGLRNRAPDPRRPPEVASAIQPTPVSRDPPGPQPQASSSIRQRISSFENFGSSQLPDRGVQRLSLQPSSGETTKFPGKQDGGRFSGLLGQGATVTAKHRQTEVESMSTTFPNSSEVRDPGLPESPPPGQRPSTKALSPDPLLRLLTTQSEDTQGPGLKMPSQRARSFPLTRTQSCETKLLDEKASKKISSQLSSAVMKSLLCLPSSVSCGQITCIPKERVSPKSPCNNSSAAEGFGEAMASDTGFSLNLSELREYSEGLTEPGETEDRNHCSSQAGQSVISLLSAEELEKLIEEVRVLDEATLKQLDSIHVTILHKEEGAGLGFSLAGGADLENKVITVHRVFPNGLASQEGTIQKGNEVLSINGKSLKGATHNDAILRQARDPRQAVIVTRRTTVEATHDLNSSTDSAASASAASDISVESKEATVCTVTLEKTSAGLGFSLEGGKGSLHGDKPLTINRIFKGTEQGEMVQPGDEILQLAGTAVQGLTRFEAWNVIKALPDGPVTIVIRRTSLQCKQTTASADS

SEQ ID NO: 16 - DNA, 36976 bp, Homo sapiens
accttagaatgtcgggagattgatttggacatgagctataaagaatgatcttgtggtggagatcagccgctccgcccgccaggacaccccctgttgtgggcactggctggggaggggcaggcctccttcctgccccccaggacactcttgggagatgcatttgcaatctggctcagagggagggagtgaggctttgcaccccagcccctctccaggccactgggagggtgggtgctggctgagcccccagggctagcaggagcggggtggacagggtctttgttctcagctcccacagcagagccaggtgtgggtcctgccaggaccagaccgaggtggggcggcctaaataccacatcccgctgtggccagcacacccctgaccctgcacacatttgtaaccctgagaaattccagggctgggccgggaggcagagaagctggaggggatgtctgaggccatacccagtgggctggttcaagcctgtggctggagctggggtctgtttatctaataaagccccacaggtgcctcaaaaaaaaaaccccaaaaaccaaacaaacaaaaaaaagagaatgatctgggcatagctcagagccgtgttcctcaaagtgtggtctggaccagcagaatcaatgtcaactgggaacttgttagaaatgtggaatctcagacgcccggacccagacctgctgaacgaggacctgcattctaacaaaatccccatgaatgtgtatgcatgttacagcttaagaagcatcgtctcagagaatgccagtccaacatagaaaacacactttaattaagatttaactaatattgaatttacaatgacataaataggagctttgatgaggttaatctatgaattctatatggaaatggtggcttaatgacaaaaatattagtaagttgggcaccatggttcacacctataatcccagcgctttgggaggctgaggcgagtgaatggcctgagctcaggagttcaagaccagcctgggcaacatggcaaaacccatctctactaaacataaaaattagccaagtgtggtggcaccttcctgtaatcccagttacttgggaggctgaggcaggaggctcacttgagccagggaggcagaggttgcagtaagccaagatcgcaccattgcacttcagcctgggcaacagagcaagaccctgtctcagaaaaaaaaaaaaaaaaaaagagagaagatatcagtaagagaaatacaggttctttctcccataaacaatatatttctgggtactccagatatattttttataaataatttctaagagaagttcaaatctaatttctttcaataactgatctggatttgatttaaaaatttatcctatttaatttgttacaatactttgcactctaacatttgtgtatagtgcaaatatatcatctctcactggttttgggttttcctaaatcaggagagttttgccatccttttaaagggtttcctacaattgcagtgtatggaaaagccatccctgcttatgatgctgtctctctggagcttctgaattagaaagggatttgctgttatctgcgggagggtggcaggtgatttgctgagctgctctgctggtttgtggcacatactgcaggttccatgtggttgtcttggtcctagtaccctcggacagagagtacctccttcttagatctgcagtggagtagggattgttctggaagcttctgctttccttagcatctggtgctatacaaccatggccttcagttacagcagtaaaaaggaagcaagggtgaaggaggatgaactcagcagaaggaagtcacagaacacagcaggggacacagggaaatcagcctcaggaggctagagttccaatcctggacctgctgatgaccaactaggccaggggtctgcaaactggggcctatcactgttttggttttgttgttgttgttgttttaataaaattatattggaacaaagccatgctcatttgtttatgcctcgtctatggccacagctgtcatgctattaatataacagcagagttgaatagtttcgataaagacagtatggcaaagcatgcaacaccaaaaatatttactctctggccctttgcagaaaaagtttgtcaattcctgagcagacctagatcagggaaatctattcaacctctgcaactcaatttccctatctaggtcgggaaggggactggattatacaaatcttccatgtatctatgtgaccccgtgtttcctaccttttttttttttaaggtttaggttgctattaactcccttcccacctcacaactagaatgaatgccatcaccttttctccttatttctttttgcaagaatctcaactgctctcctgttgagttattttttctctgccttttagcacatgtaggatgttaggtccgatattcaacatcctgtgtgtgctatgttagatccaatccttccttctaactagtctacttatgggaacacagaggcccaaggagaggatgtggtggattaaatcctggttaattgttatttagttgaattggctaacccacaccctcagtctttaatgggcatagttaaatgtgaaaagaaggaggaaagttacagatgaacttttgttaatgttgacccactgtaaataggaaatgtctgctgctttgtggttgtacggtaagggggtatgggatatgctactttggtctgccctgttctgagttttggtctggtggctagtggggtctacttattcatgtgatttttatatctcatcaaacagcccagccaggagtgggcccctggggcagtgactgttcaaatgtctcattgattcacttactgatggcttcttattgatgcttgcacaggtgtggggacgagattgtggaaatcagtgattcccctgtgcactgcctgacgctcaatgaagtctacacgatcctgagtcactgtgatcccggtccagtccccatcattgttagccgacatccagacccacaggtaacacccactgggttatcctcttcttctcaggctcactcgttcagtaccaaaattggaacaagaaatagatgaaaacagagatgttgctggctgggtttgtacctgaattcccaagaatcccttccaagtttctgtagtaagaattgtctgcagcagaggtccactaacaaactcctagatatcagaggcaattgacattaacttagggaagctcttacagctgagttataagctctggggcaggaaagtagagacccagggtcccagctagtagaccaagaaatttattcatttatgcgtctagtaggtacccactgtgggaatgtctggaggcaggtactgaagatacagaggcaagttcatagcacacagtcctgccctgcagaagctcacagtatcaataaagagcctgacatacaaataattgcaaaacagagatggtaagtcctatgagaatacaggaatatagcagggaatggttgataaagtaaaaaaataccagaggttagttttctccaggcagagaatataaggaagatcattccaggaggtgggaacacaaaattcaatgtcacagagtcaaaaagggacctgacatggaaggagaggagtgggttctgtggggctggaatgtagggtactaggtaagagtgactgagaacagatgttggcagggcattggggttacactgcagagggctttcaacaggatactaaagagtttgcattttattctacatagtgaggagctatgggaggtctgtagctgtagaaggagcatgttcatattttaatttttaaacctttgattgcactgtagaagacaggatagagtgggtggagtgtggggtttgtaagaggaaggaagctgatggtgagagcctgaactacacagcagccatgagaagagaaaagagaaggggcaatgtattagtctgttctcccgctgttgatagacacatacctgagactgggtagtttataaagaaaaagagatttaatagacttacagttccatgtggctggggaggcctcacaatcacagcagaaggtgaaaggcatgtcttacatgatggcagacaagagagaataagagccaagtgaaaggggaaaccccttataaaatcgtcagatcttgtgagacttattcactatcatgagaacagaatgggggaaactgcccctatgactcaattatctcccaccaggtccctcccacaacatgtgggaattatgggagctaaaactcaagataagatttgggtagggacacagacaaaccatatcaggcaacatgaggcaatgcttgggaagactcaacaagagctgctgggcaagtggctctggggtaagagagggaggaaccgaagatatctcgaatatttttagattggaagactgagcaatggtcttccaccagaagagagaagaggaaaaggtagcaggcttgggagggagagaagagcatgatcttactgtgggacatagtgaggtggaggtaccacggggtgtccaggtaaagatgcccagtaggcaagttagacttagggctgatagcaactataacaggaacccaggctggagctagacttgggggttgaatccctgctgttggtgagagctctggggaacctggaataatcaccacaaagaattatttaatcttaatatgcaccaggcatgtttttcaaagatgtgacccacacaactgcatttagttgttgtgcagcctcctgaaatcagtgtgatatttcccccccaactcacagatgaggaaactgaggcttagaaaggacaaataagtttcccaatggtgaagctactaagtaaagaagctaagatttaaatccagcaaagcctgtgctttgaactcactgactcccaaactcccagtgacacttggacagagtggagtaatgagggaaatcaatatataatggtgtggtggaattcaaacccagccccattctgtggattgcacactggagctaaacacaatcagagacaagcaaacttcttaattaaggcaaacaaataattggcctaaatctctggacaatacaagaaaagaaagaggtcccaattaatttgtcatttcctcctgctgcttttaggactacggcagaaaatcagtggagtagggcgtcaggttgtgggcaaatgctgtagccctgggcttaaggaatgtgcattctcccagagacatgggacacacacagagaggccacagaggtgagggccttgagagtgagggagctggagttccagctgctcagataagggagccaggccagaaaggacaggtaaggtttagagcagcagaaagacgaagacaccctaggccgtggagatccaggggcacaggcatagggcagagagaagagagccaggcccagcagcagaatgcctggcatgtgtccagtctgctgcttatggttaatttgggcaactcatctaacctccaagagcctctggttcctcaactctgacataggggagtggtctttaccttacaggactgttgtggatggtaactctcctctagtaagagtttaccatctgccaggcattgtgccgcagactttaaatgatttatttattgttgtttattgtggtaaaatacacataacataaaatttaccatcttaaccattttttaagtgtacagttcagtggcattaaggacattctcattgttgtgcaaccattgccaccatccgtctccagaactctttccatctttcagaatttaaactctaccagttaaacaagtccctatgttctcctaccagcaaatcctgggaaccaccattttactttctgtctctgtgattttgactactctacgttcatcgaagtggaatcatataaaatgggtccttttgtgtctgccttatttgacttcgcgtaatgtcctcaaggttcatttatgttgtagcacgggccagaatttccttcctttttaaggtcgaataatcttctagtatgtgtatgtgtgtgtgtgtgtgtgtgcgtgtgtgtgtatcacatgctgtttatcatctgtttttgggtacttgggttgtttccaccttttgactattgtgaataatgctacaatgaacgtggagtacagattcctctgagatactgacttcccttcttttagggtatatacccagaagtggaattgctgggtcatatggtaattctatttttaagtttttgaggagccttcaaactattttccacagtggctacaccattttacattcttatcaacagagcccaagggtcccgatttctccatatccttgccaatactttgttattttcttttctttttttgagactgagtctcactctgtcacccaggctcgagcgcagtggcacgatcttggctcactgcactgggttcaagtgattctcccacctcagcctccctagtagcagggattataggtgtgtaccactgcacaggctaatttttgtatttttagtagcgatgggctttcaccatgttggtcagcctggtctcgaactcctgacctcaagtgatctgcctgcctcagcctcccagagtgctgggattagaagcatgagctaccatgcccagcctcttttctttttgtttatagtagccatcctaatgtcctaatgtgtgtgaggtggtaactcagtgtggttgtgatttgcatttacctaatcattagtgatgttgagcattttttcatttgctttttggctgtttgtatatcttctttgaagaaatgtctattcaggttctgtgcccagtttttaatcaggttgttttgttgttgttgttgttgctgagttgtaggagttctttatataatctgcaactcaactatttatctgaaatatgatttgcgaatattttctccaattctatgagttgccttttcaatctgttgatgatgtccttttgatgcacagaagtttttgattttcacatagtccaatttatctatttttttgtttcctgtacttttgatgtcaaataatttatttttaaaaaacctgtcctcattttgaagtgggttttattattgttattattttacagaaggaagaaatggaggctcaggaggttaagtaacttgtctaggtgttcacacctagacagtagaggaaccgggactagaacacaagcctttttgactctaggactcatactcttaactattactccaaagtgataataaactgtgagtcacagctcagacagtataatagtgattgtgattattacgatattgttgataatgatgatgtcatgacagcattgccaagaacggactagctcatagagataacctatgaagtggtaactttgcctagaattttccagcaagtagtggggagaaggttggagagttgagggggcctccttgggaacccctgcattgatagactttggactttatctagaagatactgaggaaccattgattcccggggtatttctggaaatggaattcatcagctatttgcagagtgggttgaaataaaataatttagaatccagtggcccagctttggagctggtacggggctgggagcctgatgcaggagcttctactgtttgtttgaggagatgactgatattttctaggtctctgaacagcaactcaaagaagctgtggcccaggctgtggaaaacaccaagtttggaaaggagaggcatcagtggagtctggaaggtaagacaaatggtgaactttgatgtaaaatatctttgccttcttagaaagcttaggatttatccattaactcatcctctatccaaggaatagtaacagcatttaccatagaccagcatagtatgtagacaaaggctgaaaactagcagcccaccagctaaatttagcttatatttttgctttgtttggaagacacaagattttaaaagcatctgaatttaaattgctacaaatgtgccaggctctctccagctcccggtggtctccaccgttccctttatcctgtaccaagttgccattcacacaatagcccctgcaggcacttgagtttgcagcccctagtttataataatagaatattagaaaaactaacatttgggaatataattctgacatttatttaattcttataattcttataataaatcagagactatgctaattcatgcattcacacataatttttatgcaaattttataagaaaaagtgaggccctcagagactctcttactcaaagtcataccactagagcacagaggctctggaatggagatccagctggcttgactcccatgcctagccattgggcattaatcacgtctaccatggaacatccttatgaaagaacaacatgcaaccattggcactgatattgacaagaaattaaatgatctggggaaatgttcagagaaaagaacagaacacaatttatttcagctctggtttattatttctacccacccaacatgcatatatgctcgggaaagcatgacagagaaactcaccaaaattttgacagtagttatttctggctgataggaacacaggtgaagtgaatttttactttcattccttcctccttgtggctgagttttctctaaggaggatgcattatttcatgatcaggaaaaaaaaaaagaaaactttttatttaaagagaaagtgagttaggagcttggctggccttggttctctctcatggggctcctctggctttcttggtctctcagaatgagctggaatttgagcaagagactagatttcaatcctctcccaccccttcaagctgtgattttaggaaaggggcacccttgacagcttaccactagagagaagggcctctcaaggatgtgtgggtagccctagtgctggaaactagggtagggggtactgagaaccaggaagggctaatggggagggagggaggaaggtgcagtggctaagaaatagcggctttctgccctcacctcaccctcaactggaaagaaatagtgacttcttcgtgtaagattcaaagtgccttgacaggtagtttctctgtctttgttattgagcctcaaaataaccccagtgactttaaaattatcatcctcattttacagatgcagaaatggagttgggtcccccaggaagctgactctgagatggagtttggtctgcaggcagtgtcctggggttcactacctgtggcagggaggggagcaggcagggtagacagagggaggatggagctgaggtgcacacccaacagcttcagccaagccctggagctctgcagccaaagtccccattagagttgtcctatgttggccaacatagctgggcctctgtaaccctatctccagcagtccctggagatgggctgccccattggacaaggcagctgtctgcagctgtggcagcccctggagggacccacagctgaaagtagtctgccagcagcactccccacagctgggacaccaagcccttcctcgatgggtgatctgggtggcatatctccatatacatcagtcataggctcagaaagcttgaatgattttcccaacccaaagtcatacagctcgccagggaccaacaccaagactgccatactccagatccacagtgacttcagataagaagcagatggccgatgtgcagtgtgctgcccgtggcagtcacaggtgaggccagggggtatttctgttttctgaagctcagctgtgaagattctcttgtgcttcccacacaggtgtcaaaaggctggaaagcagttggcacgggcggcccaccttggagaaggaacgagagaagaactcagcacccccgcatcgcagggctcagaaggtcatgatccgctccagcagtgacagcagctacatgtctgggtccccagggggaagtcctgggagtggcagtgctgagaagccgtcctctgacgtggacatcagcacacacagccccagcttgcctctggcacgggagccagtggtgctttctatagcatcctccaggctgccccaggagagcccacccctcccagagagccgggacagccacccgccgctgagactgaagaaatcctttgagattttggtgagaaagcctatgtcctccaagcccaacctccacccagaaaatactttaaaagtgacagtgaccctcagaagagtctggaagagagagagaactcctcatgctcttctgggcacaccccacccacctgtggccaggtaagaggatgggtccacaggttgagtgtttccaggaccagactcaaatcttgagcatgggcaaattagcaagttagtgttagcagggccagaatgaaagtttctcctgctccaccagagagaaactgttgcctaggactcagctgaggactgaccatgaaaagatgggtttgaaggttgacagataattgaagtcccagtcctgcttgctggcatctgggttcccacccataacacactggaatttaaggttcctttcttgtgtcatttttcactcaccatgaaggaaaaataccagggcccctgcagggtctcagtctttgcatgtggatctttgagtgtcctgcttgtagggagaatagtggcttaaataactaaaaaggggcctggcacggtggctcatgcctgtaatcccagcactttgggaggctgagccgggtggatcatgagctcaggagttcaagaccagcctggccaagatggtgaaaccctgtctctactaacaatacaaaaattagccgggtatggtggcaggtgcctgtaatcccagctacgcaggaggctgaggcagggaattgcttaaacccgggaggagtggctccttccaagggctattgtgaggattaaaggtaaccacttaaggcaagtacctgacagcatctcaggcatattagcattcattgccatgatctttccccatcaggccccttaaagccctcctttccaccccttgcataaaaggcagactgactgacagacagctgctgtgtctagaaccattttatgcgcaggctaaccacactgagtactttcatgtacattgtgtcaattaaatcttacaaccacctgatggtgagagtcccagttgtgcaaagagggaactgagaaactcgctcaagttcacattgctagtgggtcacagttacccactatgcaatgctgagtttcccatccttacccagaagctgtctcccccatcacggaatggccctgcaggggccctggcccttcccttaagcacaccgtgggcaggtgggagggggcctctggaaatcccctaaaacaatctacagtgagggttggcaagcttcaggaggggtagcggtggagacgggatgttgagtaggaggggtgaaagtgaaggagggaggaggaagccaggttactaaaaaggaagtgcagttttgcagagcgctggcaggatgtggctggttagcaacacatgatggagttatcagatggatctgttctcccaccccctcttttaagcccatatttcattttcccttgggcctgagacctatgagtccagaagggcaaatcaggagcagccagctgagaagccagtcattttgccttcctcctggaggcccagaaaaggagtgcagttgccacagcaggtctgtcccagtgatgcccttggcagagccacatagggtcagggaatattcccgagtaaggcgtctggagaaggaactggggtgtcctcagggaagcccaggcaaggaacttcccacaggtcatctttcatgccctgtgtgcctcagcagaatacagggctccctcctgtacctgcccccaacagcaccgtctcctggagacaaggccgttctgcagctgccctcctctgtttgctctggtctgtcccacgtggccagcagatccttctcccacaaacatttccataaaagcaatcagcacgacataattttattgggcactggagaggcgggggtcacagagaaaggatcatagcacgcaatagaaaacaggaagcaatttgcttgaggtcactctcaaaatttccttgaccattcctggggatttctcactggatgttttcttccgtggccacagtgtccactgtctcactctcccacttttccctccctgcagtcttttctctacagggtcccaagactgttgtcaagctgctatggatgacccccaagtctttcccatctactctaattcaaggggacttaactctcacaaccaatatgaactttgggatattttcttcaacaaaaaactaacatccctcttataaaaaatcagcctaaactctcccccgtgctttaaaaaacttgcttaaaaaaacacaacaggattttcgaagaatcctttcttagaaaacaaacaaaaaaaccaaacaaaaacgtactttctccccactatgctgaatctgctctctccctctttccttctttctcttctccctccctcatccaccaagcatggttccaggaaacactagtaagagaaaaatttgtgtaaaatcaaatttatttcaggggctaattctgaagtctcccatgaagaggatgcaatattggatgtgttgatgaaaagacaaaacacatttgtgctgttctaagttgtaaagctgcattgactgcagttggtatcacatgtggctgcctgtaaaagagctaacaattcatgaatgtcaacagatgtcaacttacagagctcccaaccaggtgaaattaaatttcatccccatgtaatttctcttgtggacaagagacttagagatcatcaggccaatatttggagcttctaatgccatgactcagccttactttttttaagggctagttcgagaagctcaatgattcctttgaaattggttgatctctcagtatttcataatgctctcctaaagctcagttctacagtagggaactcgagctgaggcaatgctctgtgaatacacttctaacttttgtagacctttgcttcctccaaaatgtttattgtcaatgtagatcttaaatttcaggtcatggatatttgccattgcttttttagtcccaaaggatgcatttgttccttcctctttccttcctctctggaaggaagcctgcagccatgtcaaatggcccatcattacacaaatctggaatgaaccggacgtggaggccaccgcagtatagcaaagcatttctcttgcagacaatcaaatacaggtggcatcattttgatgatgtctgctttctcaatctttttttccagatgggtattatgtttggttgggctatgtctctggaacactatttttctgcctctctgcctgcaaaattcttactctgtttatgaagcagacagaaagtacttctctaggaagccttctccacctctgggatggaactggtctctctgtttcctctgggccctgacagtaccttaagcacactgtgtgataatccaaactcttcaagtattgcatagctattcagagcctggttcatcttgtccctaggctgttttgggaggaccccaaggctgcatccaggctcagtggtggaaacaattctgcaacagattgaggatgtcaccctaggtgccacagaggggagcaatggcacaggtgctgagtatctgtcatcttttgcagaacacttactaaatatttgaagagtgcttaacaagtgacagcaattgacaagcattttcctgagtgctctaaccttagggaacactagctgccaggtttttttgctgccttgtttctacgctgccctataccctcccggggtgggtagttcaccagatgcagttgtaactgaagcaatgccagtccctccacactcaaagccttttgttcctatcataaagagtcagggtcttcaagtatgtcaacagtatgagcccatgacctggataccaggttgctggaagtcaagggatgctctgcatgtctaggaggtgctggctctgccacgtcagcaccaaggagaaaagaatcctctttacatggctgctgatgaacttctcactgaaagcagctcaatatccgtttttccgtcccaatcaaagcgtgtctcgccttctcacagcttgaggctaccgttttgacatggtctcgcttcctgtttacaccacaggaagcgagagagctgctgccactgctgctaccacaggaagacacagcagggagaagccctagtgcctctgccggctgcccaggacctggtatcggcccacagaccaagtcctccacagagggcgagccagggtggagaagagccagcccaggtaagctttcattgagatcttccaaaaggaagggtcttttgaaaaaaggtgcagggataagataagagcacaaattggcctgaggatcagagtgctctgcattgacatcaccactggacctggctgatcaacagtcaagggttccaggtgctgggcagcagcaccgtggaggtgctgtccagggtggggagcctcctgggtggacgggtgatgctgtgggggtggcagcaggaatgcaggccattctggataattgggaggatggagcccttggaagaggtccaaagacacacccacccagccatcctgggcagctacctctagggtgccaacattccagttgcaacagtcctgctgcattcaggatttctgagtcagagaatgcaacgccagaaaagtataaatagcatctaccagtggtcacctcctccatgaggtggatagcaagggtgtgtccacatggtacacctgacaatgctaagacatgacttgaatatttatttgcttgctagagagagcataggacttgaagtcagggaatcctggatctgtctgtcattagtatgattctgagcaacctactttgcctttctgagcccagattcactcatcagcaatgtgtggaagagcacgtagaccccaagcatatgatgcattcagcaagcacacattgaatgctggcttcgtgaggccctgtgctagatgctggggggagagagagaaagggatgagaccaggtagtcaggtcctgcctccaaggagcaactagtagtggcaggaaataaacatatagactataaaacatatgactgtttgagtaacactacagaaaagctcatgaaagacttttggagggctaagggacattttggaaagatctagcacatctcacccagagcagaggccctgtgggtggaggctcctctcccttagtcaccctaattgaggaacattctagcaaaagcaaacgcctcagtgtttaactgacaggaggttgtcactccaatctgcaaagggcttgcctgtggaacctctgcctcctgattctcacaacagcaccttacagccaagccattcaaaaatgcagaaacaggctggaggcctgggctcacttgcccaaggccagtctcttagattgtgcagaatttctctttgatatcatcaaggtgtaatgctccatgattcacttcttttgaaacctggcattgagacaagggacaggagggatcagagttccttcaactgggttgcgttccagtagcaagcatcccccaaggcacacaggccagcctccctctgcccctgggaaagagagccaggacaccctctcccttacccatgcagatatgatgctggttcaatgctggcttctgagaaagactcctatgtgctccagggcatgcctgaggtcctggctggcacagagcaggttgcacattgcaatcccctgctcatcacattcccaacacccaggctgcatcccaggtatcttcagtcagtacctaggggtgggcgtcagtatttttcagggccctccagattccagtatgtagccaaggtggagaatcctacttcacagattcctttctacctggaaccttttcatcagcttttgagggagggaaaacactcctttgccgagagcaagctgatcaatgacctgtgtataggcagagcagcaaacacacggcttcagggccaggcaggtacatacatgggaaatgctggctgggtgagagggagcgtgaagagctgtgggaagccgaagtggccccatcagaagctgtgcacaggcaccttgtttttaatgacacgggtaggtcaaagcacaaacagctgccaactcatgacctttgtcttaaaagtttaaacggcaggagaactgctttggcttttacacatttaacatggtatcttggaggctccttagtgcagtagaaaggacatgaacttcaagagtcaggagacacagggtcttgcctgagcactgccatcagatggccccttacccttcttgaaatgtaatatgccagaggtcggcccagatattctctgagcacccttccaggcctaaaacactaggatactgtgagattaactcctacttctggtccttcactcctgcctgttggcagctcagtcaggtaatagcacctggagttcacccacctgggtgtcccccacttctgctaatctcctcctcttgaatccttcttgctgttcagcttggaaactagaatttaggaagaaaagtcactgtatgatgtaatgcacagctttggccttgtttctgcactgtagtgacccaaacatccccgataaaacacccactgcttaagaggcaggctcggatggactatagctttgataccacagccgaagacccttgggttaggatttctgactgcatcaaaaacttatttagccccatcatgagtgagaaccatggccacatgcctctacagcccaatgccagcctgaatgaagaagaagggacacagggccacccagatgggaccccaccaaagctggacaccgccaatggcactcccaaagtttacaagtcagcagacagcagcactgtgaagaaaggtcctcctgtggctcccaagccagcctggtttcgccaaagcttgaaaggtttgaggaatcgtgcttcagacccaagagggctccctgatcctgccttgtccacccagccagcacctgcttccagggagcacctaggatcacacatccgggcctcctcctcctcctcctccatcaggcagagaatcagctcctttgaaacctttggctcctctcaactgcctgacaaaggagcccagagactgagcctccagccctcctctggggaggcagcaaaacctcttgggaagcatgaggaaggacggttttctggactcttggggcgaggggctgcacccactcttgtgccccagcagcctgagcaagtactgtcctcggggtcccctgcagcctccgaggccagagacccaggtgtgtctgagtcccctcccccagggcggcagcccaatcagaaaactctcccccctggcccggacccgctcctaaggctgctgtcaacacaggctgaggaatctcaaggcccagtgctcaagatgcctagccagcgagcacggagcttccccctgaccaggtcccagtcctgtgagacgaagctacttgacgaaaagaccagcaaactctattctatcagcagccaagtgtcatcggctgtcatgaaatccttgctgtgccttccatcttctatctcctgtgcccagactccctgcatccccaaggaaggggcatctccaacatcatcatccaacgaagactcagctgcaaatggttctgctgaaacatctgccttggacacagggttctcgctcaagtgagtttctacacccggtgtttctctttacctttctcatctttttctttctcatctttatttttaaaaataatcctatatataatttaaaaaattcccagatatattgattaaagaattgttctgcctctttctttccatgtgtgtgcagatgtctgagtgtgtgtgtgtctgtctgtaggtattacacctctgcctttcacattaaggaggagttttcacaacatctggcttcaggagggctgggaggtaggaggtgggactggctccctggtgaattgctcatgagggctgacatacgcctgtggagatttggaaggttgatgcacatctgaaatgtcctgcggttactcagaaagaccagaatgaggccaggaaattatccatcaggaattcttactctccaaatggaatccacttgtactctgcacgtgggttcaactccctcgtcagggagttaggatgtctgggtcctagtctcagcttaggcactgattctgactatgagcaggttctttccatgctcaccctcagattccttgtcagttgaaattaggagatggatgagaccttctatgcagaaccaagaggatgtcagacgtgccatagggtccctgctgtagggctggggcttggtcttccctctgatcaaagtagctctgcatttattagttttatttattattcttacactgctgggaaatatctgtagagtgaaggtatgctagtatctactcatagatttgttgcatcaaataatatgcacataagtgcttggcaccacacctgggacatagtaattatacaatcactgttacctctttttaatattgttgttcatactgtgtgttgtttctccttatgaaagcctttcagagctgagagaatatacagagggtctcacggaagccaaggaagacgatgatggggaccacagttcccttcagtctggtcagtccgttatctccctgctgagctcagaagaattaaaaaaactcatcgaggaggtgaaggttctggatgaagcaacattaaaggtaggtttcctttgtaagcatctgcagtaaccaatggcttattatggctgtgtggccaccttagttgggccagaggggaagtagcttgagtagcctgctcacatcagacccaggttgcgtcctgtgatggtgggacactgtagcacttgaccacagtaagaccttccatttgaagagagccttttagcttgtgaaccactttcagtagattgacttcttgcatcttcttttgtcattttataaatgagaaaggtaaggctcaatcaaggttacagaacctgggttttctgtctccaagttcaagttcagtgctgtttccacattccatgtgctgctgtcctggcatgtgtctgttgtgggatgctgtccattgtaaacaatgtgggttacaagagctctcacctggagctttcattatttccactgtgcatggagaggtggctgatcccagggctcacaagtcccccacgcttcagtcaagtcattctgaaagtctcacttcccatatgttttctgagcatgacccaaaggggtgtggggaggaagtggccaggctgagctggggccagcagtcaaatgagctcaggctcatgggtcctgcaccctctaggtgctgccccaggcctccgtaggcttttggcactagaatgatccaggctaggatgagaggataaggaggttctcgttttccatacaaggaggcctcatagctgcaatttccacatcaagagtgtaggtgagtctgatgagcccaaggtgctgctgtgctgagattctttcgctgtggctttcacttgtcacctgggaccatcatcccccaggatcttactcagtgcaaatgaaataacagaggcagagcgtgtaaaacacaaagagccatcctgcctgagctgctctggggagagtatttgctttctaacatgagaagagccttctacaaggcaagtaacctgatacttgggtaaaagttgagagagttgggctagtgttggggcttggaggtgagggtgcagtgaggtacattcatccttccatgcctttgggtcttaggggctccaagtcttaggatcatagggacagctgcaagtcaggtgctctagtgacgctgagcaagtgaattctttgacataagtttactccttagtgccaaggtacaaacaggtgccccaagaacctgtaggtgtactttatttggtctgcatggtgatgaaaaaaatattgaattctatacatgataaaacctgaattgaaacctggactttagggaagtgatctggtagcgctagttctgtatgcctacgtagagctgaccctttgagcagatgtactcgttggcgctctgcagttcctatcacacatctgcccatttggctcattttagggacctgcctgactcctataggcatctgagtttgagacccctgctctagactggaataggagtctctgactgtgtcctggctccatgggagtccccgtctaggctaggaagtaccgtagtaatgtgtgtgtgtgtgtgtgtgtgtgtgtgtcacacttgcacactgtgcattggggcaggatgttagctgggcttccttagtgctgctgctgtgacccatggagaagtagaagggaagaaggagcaaccaattcctgcagaacagcactgacccctgttttgttttttgttgttttttttttttgttttgttttacctgaagtcctacaacctgacttcatctcacactgtccaatatgctgatttctggctgacttcatggcactccccctgcccggctgtggacagggtgaatgagagaggaaaataattatgcttgctgctttacatacattttttttttcttctaagcttcccatgactcctgaaggtccattctttacagatgaggaaactgaggtttgaggaggtgatgtaacttggaggctggccaagctggggtttgagataacaaatcagtctgatgtcagtccgatgttaaattgttcatcctcttgcagtaaaatgtttttgaatgtatgtatttcctctgcagcaattagacggcatccatgtcaccatcttacacaaggaggaaggtgctggtcttgggttcagcttggcaggaggagcagatctagaaaacaaggtgattacggtgagtggccaagtgaaggggcatgtcacagccagaggcaatggttctgggggagggggacacacttgccaggaaggggccctgtgctggggaaatgaagaatgcatgacactaggccactgggcaggtcctgtccactcagcacatcccagagcctggggctgcgtggagagggtagcaggcctggccatgggcatcttttcctgtgggtcccactattctggctcatccaatctgatcagcattggctgctgccttcaggtcacctgtacctgacccagatggtttctggttctgccagttttgtggagccatgctgcggctgctcgctctctaaagccgagtgcattgctgtcatcccagggctgtgttgtctcagggtatcctttgtgtaggctgtgctgggctcatttgaatttccatgcccaactgaaaacaaatcctccagttcacagcatcagccagcattcaacataccacacccccttgcagtggcaatctggcatgttcctgcgtgtcacttcagagtcaatcatgtcagtggtgacttccttgatttcctgataagttttctatcacataaaaaacacttaaaacctgtaagtctctatttctctcactgagtgcagctgagtattacaaaaagattcctgaccgtgtagtttactttctacttgaagaggaggaaagagagcttgcctgtgggaatggcactttgggtatttttctctgtccatgagtagcaacttctgtccacgtcatctggccagtcacccttgagacactgcagacaacaggaaactaggaggaaggcgcacatgttggctgagcacatgcacaaaagcttctttctccttctgtgtttgagcatttctcttcctttccagatgattaaaagggaactaacgtagagcaccatccacggccatgctgagcactcactgacctgttgtctaaattcatcctacccacactttggattgataaattggtggcatttatgcttcttttatagaggaggaacctgaggttcctcctttaattaactttaatcttcgttggcctaaaaatcctctagcattgaggaacctgaggctcagaggagaggttctgcttcatgcttggatgttacagcctggggattctaaccatgtaacagaatttttctaacaccaaaacaatttagagaagcaaagagctttgctcctatcataaaagcaaaactacaggtaccacattttagtggtttccatgcatgctatcactcagtcctcttaattataatggacctcattaaagaggctgaggcagagacatgagatatttttgtgtgtttgtttatcccacatatcttgcagaaaggggaccaagaggtgactggaggtaaagagtcagaatttctaggggaggagctataaaaatgtctagactgcctaggagagtgtttctcaaaatgcattctgccaaatgagaccgagaatttctctatgagaaaagaattctttgttgaaacactttgggaatccccataataccctgccaatacttagaaatctgccatgcagatttgcattgtagaccctctaaatgccttttgcttagaaatctgctgccatgcaaatttgcattgtagaccctctaatgccttttgctttttaaaagtagacaatgtcagagcttttgtttcacccagtattcctcaagtttctttgattttaaaaaatttttcttggccgggtgtggtggctcatacctgtaattccaacactgtgcggggccaaggtgagaggattgcttgagcccaggagtttgagaccatcctgggcaacactgggagaccctgtctctattttttaaaaaataataggaaaagcctttttcttacacaatacccgttaatatgccatagaatcagtgccttgagaaaactactctggggacttctgacctagggcaggtgaagcaaaagattttatatggaatcccaactagaatcgtggtggtacactataggacgttgtgttgggatggattctgagggcttacctggtcattactgctggtgatctctgctctggatggagaaggagggaatgctggcctctgtgccagcagctccaatctaggacacaattatctttaatctttgttggcctaaaaatcctctagcattgactaaccggttcaatcctcctccagcaagtatgtggactggacttgtgtgatttctggtcctgacttcctttggtttgctcaggttcacagagtgtttccaaatgggctggcctcccaggaagggactattcagaagggcaatgaggttctttccatcaacggcaagtctctcaaggggaccacgcaccatgatgccttggccatcctccgccaagctcgagagcccaggcaagctgtgattgtcacaaggaagctgactccagaggccatgcccgacctcaactcctccactgactctgcagcctcagcctctgcagccagtgatgtttctgtagaatctagtaagttctcccaactcagtggaagccacatgggccacatcctctttggccatttggggccagacctgatggggctactcagtaatttgtgaccccaagaatgtgtggctgcctagtacactgcctgagacgtgtttacatgtgcctgtgtgcaaacacgggggctgtatcaccccgggctcacttgaagcccagggcatctgtggcctgggagaggagaggatccctaacagagaccttgtgtttttctcagcagcagaggccacagtctgcacggtgacactggagaagatgtcggcagggctgggcttcagcctggaaggagggaagggctccctacacggagacaagcctctcaccattaacaggattttcaaaggtgtggggtgtgtctggttctttgcgtgctctccagttgtgggcatgtggccaggcccccaaaaggcttctgggcactttctgggctatgttgtttcccacaactccatgtcctcttcataggcatgctggtccttttagggctcaattctgctttttctactttttctcctttgctcagacatcccctcaatcccccctctgttttgatgggtcttcaaaaatacctaagtcctgggcttggttcgggttggcagggccaggactctagagtggggcagtgaggcactggcctgtggggcagaattttaaaggggtgccaaaacactcagtaactcagatcgatactattttaatgcagcgtgttttttaaaattaattttaaaaaaacatgttggacaaaatatccaagtttaaatcaagacagagtctgactttgtactgcacacttggcctcatttgccttaccctagtcctggacacgtcagctcctgcctttatttaaaatgttgatagatattttgttcatcagggattggagtacaaaccagtctgatatgggggtcacttggatttccctgtgaaaatcatgaatgactgtggctaccatgtaaaaccatccctgattctttggtgttcctcaaattggaggtctccaagccacagagcaaggggttgtagagagaggagtactggacagggaggcaggtgggccaggttctagtcccagctctgcctgtaatgtgctgagtgacccttcccttctgggcctgaggctcttcatccataaaaggaggtaaagaggtacaggtgtgtgtctgagggctcttaggactgagacccaaagggactcttagctctgtccctcacccactatgagctcctgctgctgactggtttcgttagaggaagttctgctgcggctgcagaaacccagaaggtagagtgaggcttacatggcattccccccagaatccatgttaaccccaattctgggaaagatatttctaatttttgaaggtcaatttggaaggagcattgggttcaatgtcaagaggactagattccagtgttagttctgccacatgaccttggtagcatgatcttggacaagtcacttcaccaccatgggcccatttgcttaaatgtttaggatgagactgccagctgcagggtgatgttggaaggagagatgcagattctggagccagaaagtctgggttccagcccagggcccaccactagcagctatgaagctctgggccagttacttgagttcttggtttcctcagctgttaaaaggaaacacaaataatacacccctcataggattactgtcataaatgcaaaacattagcacaacgcctgttaaaataattgcccaatacactttagctatattttcattactatcattagtattatcttctactcttatcaggatttgtgaagatcactgtgtcaaatggatgggaaattttattttaatataaacagtaaaatagcattgttttcacttgcagctttgaaatagtgggggccatatatggttgtttccttttttatgtggacacagaggacttcgtgccagaggcaagatccctgtaaatattgttgcacaaaaatctcactagctctcttcccataccacccaatgctgatgtcctcaccacatgcggagaacaaatgtgaagggagtaggatattgggtcagtgtccaaagcagggtctgggcaggactcagctccccagagtcctctatgaactatggacggtgctccaggcaggctaaggcgtggagctgcctgatatttccctcccctggggacagcaagggctatccctttccaaaggccatggagagctggagcctggtgccctaacctctgagtcaccatcttaagagatgcctcattttagaaccaccaacaagcaagctcccaagggatggtgccctgttctctaccaagctatcctggctctttggagatcaaggagaggaggcaactttccttgttccccatcatctgtggaacccattaccttctccctcatttcaggagcagcctcagaacaaagtgagacagtccagcctggagatgaaatcttgcagctgggtggcactgccatgcagggcctcacacggtttgaagcctggaacatcatcaaggcactgcctgatggacctgtcacgattgtcatcaggagaaaaagcctccagtccaaggaaaccacagctgctggagactcctaggcaggacatgctgaagccaaagccaataacacacagctaacacacagctcccataaccgctgattctcagggtctctgctgccgccccacccagatgggggaaagcacaggtgggcttcccagtggctgctgcccaggcccagaccttctaggacgccacccagcaaaaggttgttcctaaaataagggcagagtcacacgggggcagctgatacaaattgcagactgtgtaaaaagagagcttaatgataatattgtggtgccacaaataaaatggatttattagaatttcatatgacattcatgcctggcttcgcaaaatgtttcaagtactgtaactgtgtcatgattcacccccaaacagtgacatttatttttctcatgaatctgcaatgtgggcagagattggaatgggcagctcatctctgtcccacttggcatcagctggcgtcatgcaaagtcatgcaaaggctgggaccacgtgagatcattcactcatacatctggccgttgatgttggctgggaactcacctggggctgctggcctgaatgcttataggtggcctctccttgtggcctgggcctcctcacaacatggtgtctggattcccaggatgagcatcccaggatcgcaagagccatgtagaagctgcatcttgtttatacctttgccttggaagttgcatggcatcacctccaccatactccatcagttagagctgacacaaacctgcctgggtttaaggggagaggaaatattgctggggtcatttatgaaaaatacagtttgtcacatgaaacatttgcaaaattgtttttggttggattggagaagtaatcctagggaagggtggtggagccagtaaacagaggagtacaggtgaagcaccaagctcaaagcgtggacaggtgtgccgacagaaggaaccagcgtgtatatgagggtatcaaataaaattgctactacttacctaccacatgccaagcactgtgctcagggctaaacgggcattgcctttagtgatcacagcagcttctacggtgtatggttctgtgccaatgtattgataagagggcacacactgtgtacagtaaatggcttatccagctggtgagtgatgcggcagattgagttttcttctgtgattcggtggagactatcagcccaagatgctttaagtgcacaacattacagggaatgcctgagtgcctggccaaagggatatttggtttggccatctctggatgcctgattgccaagctcaggaccaggcaatgtgactttgcatcagcaacaaccagcatcccttgaccaggcctgggccagagtattggtctcctctcagcccctgatcctgtgaagtaaggatgtgggggaagacctggcaaggacacagatgaaacacaaacaatagtaattctcaggccatcatcagtggagccatgttaatgtaatctgatggcttctccagggtccacaggaagtgaagaatctgtttcccagcagtggactcaaaacccatctgggctcctaaccttcctgtaaacccctttagtggcttcattagagcaggcgttcagctcactgttctattcatctcaaggaataatgggcttagagcagtttctgtcctgctggttaacttgtttggcctattccattctggattttgtcaagcagtagacaagcaattagacaagaacttggaggcaccatttgtatccactttttagacttaatagaaacattgaagatgaacataatctaccaacgaaagacgtgattcaattcaacactcccttcccatgacccaggctgggcaaggaggccacgtgatgtggagggcacattccttgcctgcacaaactcaccatctgtgcacgcagtggccttccctaaaatcagggaattgttttaagtcttatcaagcagccaagggatgaaagagaaggtgggttttcatcaagactggaaggtggggacagggatgagcatggagctggccgtgggcctggggtaccaagagactccttgagagaccaggcaaagcaagtgattgggacagaggttatctgtcccaggttatctgggcatagatgcaggtgagcccatggccctcccagtacctcctgtctctggcctgttttagaaggttctctcctccccaaggagacacaacaactcctagggccactgaagatataactattgcccaggtttctggtctctaggctggggaagtcctctgggtaggaatcagcaagaagatcctaaaacaaaagctcatccatttgcgttccatgatgctgggatttacacttgaggcttagctttgctctgccaacttcttcagagctgacacaggatgaaggcaatgccatcctcaaacactgcaggcatcacagctaacaattgtgaagtcgtcttaactcaccataaaaaggaatccactcccaggcagccctacttctttgctttgcccagcattttactgattcatacattatctcacttgtgccaacactcaagaagcaggctacactgacactggtattcctgcctccatattttctttaaaagacaaatcaaagcagatatattaagtgactgttcaagagcacacttggcccaagtggcagagcttggactggatgcatgttttccagctcctcatccagggctctgaccagtttaacctgatgcagtcacgtggaggagcagtgcaggcacagtatgtcccataggcccagtgagatgcattcttggttggctggccttccacttggctacacagggatgtacaaggcgatcccatcttgataagaccaccacctcagagtatggagctcagagagggcaggcatgaagtttccttggctggtgcacctagaattggctgaactcatgagaagttgatatagaacagtgcttgccacagagcggggactcggtaagcacttaacgaatgaatgaattctaagtcaatccaagagtctgatgatttcttgaaaagggtgttagctaaaggatcttaggcatgactgtagaatttgtagttgcaatagaacagagaaagaggaagctttctgtctccttaacactgagctgtcatgttttaaagcttgctcacatcttggcacatttaagagacagtcaccccaggactcaaaaatagggaagtaacagtaacgcaggggaaacgttttctgtttggaggagcaaaggctgagaacactgtgaaaacattttgcgcgcacaatagtaacctgggtaaatgcagcgtgaagggattttagtcacacgtggtctttcttacaaggaaggtggtgggggtgcagatgaggttgctagagaatgttagaggatccctctctggattggagatagggaaagaaagttgcacggctgctgaggccccttctaggtggcaaggctgtgctccctggttctgatgatgtgcctgggtggacatggcccctgtgagtttgtacagtcttgcagcaggatctagaggggggatttccagccagggctgctagacggaggcctactcttccatctttcctgatggcaggatggcctggccagggcctggaagacagagacctcctgcctccgcctcagtaagacgacaaggaaaggcaaatgcccaagggaaagaaaaggaaggctcttctccccagagttccccatgcagacatgagtgcgtgctcagttcagaatcacttctgagaactcatccctaatgctgcagatttgggctggaacagattcacactgtctggtttcaccgaggacatgaaactccaccttgcggggataaagagagaaaaacaaattcatcaaatggaagacacattgaaagtgtttttccttaatgcttatcctgtttttaaaccattatttccaagttgacaccttttttaaggaaaaataaatattttgcggcattaaagccatatacaaggtctatatcagaaaaatatatttggggggctgcagcacaggactgagggagcggtacatgcttaaaaggcaacagggcctggttttcagtggcgatgatgattctctatgacagtcagggaaacgtggtctctgagagtgatgggcacataaagccttggtgccagagtgcatcgcatggtgtccaggccgagtctctgtcagatggttagaggcctgggtctaccctgccaggagaggcgtgtttgggtaacaggcagatggagtttggaacacatgaatggctcatcacacgccaaccctgagtggggcaggaggcaggaagggtgggctgccgcctctggttggcattctcagagatgcgcagtccatcagcttgttccaaagagtgaacacaggcctctgcgtgctcccaggctccttggtgtcccaacagctggagctcctcgatgagtcacgggagttctttgccaagaagtaacgatagcattactcatggaattgcttcactgctttctgaaggttggcataaaaccgggtcatgctgcgggggaagaaggagtccaccacgttctgtgggaggtaaccgctgaggtcggtatggaagaatgtgaccaggttggtcttggtgggttccctgtgaaggcaacagcagagctgtgttatgatctgcagcagaggtgctggggacgagcgccaggcaggtgagcagagcccagcccagtggaaatggccatgatacagtgatcgcgtctcatcccttgctgtgccctccacccaggagtcctctctggacctgctgattttcaggatggaaacccatcctgtcggggatgcattccacagcctctcccggcctccagggaggaagaagtccctactcccagcccaaaaacccagtaccctgctgcccgattcactcagcaaatgctttcagagaactcactttgtgccaggccctgagaggaacgaagagatgctgcccttcactatttagggtctgcaacctcctgggggctcctgggaccctttcaaggggtctacaaagttaacactatttttataacaacacgaacatgtgattcgccttctctcacatgcatacagtggggttttccggaggttacatgatatgtgatattgcaacagactacacgcacaagcaggtatgagtttctgttaagcctggcatgaaagagatgggcaaaaatataaaaacaatgccactcttttcacagtattttttgttttaaaaaaatagttttttaaaataaaaatgttatctatgttaacatgcagtgcatttttatgttaaaatatttttaacatttctcaaatttaccagttacaatttcaaatacatcaaataatgatagctataacccccaagaacaaaggccctatgaagccctcaaatatatgtaagggtataataatgccttatgccaaaattttgagaactgctatttagagaactggcgaataatttgagcacctatgaagggattttggccaaggggtggcagaagctcagaggacggcaggtggcacagatgctgactggaagtccagaatcaaaggggcacacgatgtggagatggaacacaacttggtagggacaggaagcgatcttcactgtgacaaacttctcaacggccaggacaacaaaggtggtataggctttgtggtgtgcatttggcattttacttgaatgcaactgtccactcagcctcaccaggaaccccaggtagcactatgcctgcccatcagatgtttcctgacatcatgcaggctacaggtttggaactggagaccttttagaatcccactccccagggccaagcacggtggctcatgcctgtaatcccagcacctttgggaggtcgaggcaggtggatcacctgaggtcaggagttcgagaccaatctggacaacaaggggaaaccccatctctactaaacatacaaaagttagccaggcatagtggcaggtgcctataatcccagctactcaggaggctgaggcaggagaatcgcttgaacctgggaggcggaggttgcagtgagccgagattacaccattgcactccagcctgggtgacaagagcaaaaccccacctcaaaaaagaaaaaaaaaaaaaaaaaaaaaaagaatctcactcttcaagtcatacagaaggacaactggggcatggaacaggatggggccagcagatccacaaggtgggagagcatgtgctcctctgggctgtggcttttctcctctgcttgtgccctgcttccccaaagagggtgaactccaggggacagagacttccttccatctcaaagtcctagcatcatccgcactccacctttccctcacccaccaacccctgcccatcccgcctctgctagggccttctctctcctccctgctcctcctcccaatgggcttcctctggcccgcatcacctctcagcagcatcctctttggaaacatgaacaggtgagtgagaaatgagactccgtgatcatgtttccctctgggtgaggaatgggctttgtggtgggcggaacgtgtgagaggccatgtgggatgggacaaactctcttcgtcacagtggccttggtgagtggtagctcttgcatgtacaccattatgtgacaacaacagaaagggcaaaagggggcacagaggaattgtaggtcacccagtctcccctcagaaaaggctgggatgaaggcatccactacggttgctagaaggatttaatgagagtaggtgtgacgcacttagcatccttcctgtgcacagtgcaagtgctccagaaatgacactgtaatgctgcctcgaccacagatacaggctcctccaccttaagaacacctttcccccgccccccgcgccacttggagctcaaccaccaccacctctggcctcaacaccacctcacccccaatgagtcctcttgccctcttgctcacagcctcttactcaagagagcaagaggagagagaaggccctagcaaaggcgggatgggcaggggttggtgggtgagggagagggtggagtgcagacgatgctaaggctttgagatggaaggaagtccctgtcccctggagttcaccctctttggggaagcagggcatcatagcagttaagaccaaagtcagaccatgtcctgctcaggcctccccagtggcttcccattttattcagaggaaagtccccaacaggctgcggcccctgctacctcatgggccgaatgtcctagcctctcctcttgctaacacaacacctccctctgtgctgttcctcaaaggccccgctcttgctccggctcctgctcccacttctgggactttgcatctgctcatccccctgccagaatgctcgctccaccaacacgcccaagactccctgcatttgtgccttgctcaaacgtcttattagggaaaccccctagataacccactcacacctttccctggcacctttatctgggtttagttttccccaaggcacttaacgtctgatacttactagcacatccacgagatagaactacttacatttgtgttttgtctgtctcctcctgccttcattggaatctaagttctaagagggcagacactctagctgttttgagacatcaatatctgggttaagagcccagattctggagccagatggccagaatgagactgtggctctcttacttgctggctgtgtgaccttgggttagttactaaacctctctgtgcacccaccattcttattttaaaaatgaggatcacaacagtgccttacggttgttataaaaacagttaatttatatgaagtgcttacaatagtggctgacacacagtaatgctgtataaatgtttgctgctgctgctgctgttattattgtctgctgaatctagggtccagaataggcctatcttcacagaataataagagaataatcattgtcacagatttcagatccacagcctcatgagaataactgcacacagcaggctctggaagaaagctttacagagaacacgtgatgtttttaatcaagtggagaggagttggaagagtcaacacttgagttaaaaccttcatatgggcagggttttgtgggaccccaaccaccctctcagcaaaatccatgcaatcgggccaggcgcggtgactcacgcctgtaatcacagcactttgggaggccaagacggggatcatttgaggtcaggagttcaagaccagcctggacaacatggtgaaaccccggctctactaaaaatacaaaaattagccaggcatggtggcaggcacctgtaatcccagctactcgggaggctgaggcaggagaatcgcttgagcctgggaggcagaggttgcagtgagccaagattgcaccactgcactccggcctgggtgacagccaaactccgtctcaaaaaaaaaaaaaaaaaatccatgtgatacctttgctacctggcatgagggcgtgatgctacccattatattgtgcattccaccaaaaagaagacagcaatgggattcagcccctcagaaggaaggactctgcctcttattctgaaaattcctctctgtcagacccggcaccactgaaaggtgagtcttagcatctgactaccaggtgggagaggacaaggaaatgagcccaggccaggggatccagggcacctatatattgggagaactgaaactgagtgcaggtgtgtatgtctgtgtgtggtagagcacagctgtgctattttcaaactcaaaattttgttacatctaagaaaagtcttcacatgatgtctgaaaagccagcttagcaaagagggtaacataaaggtgctaggtctgggcttggtataatcccacgacaccgaggcccacctcctgggacaatgtggtagaaggacagaccccttccctccgggtgtctgtatggagactgcagggaacaccgggacacacctgcaaggcacagtttcttttgctgtcaacatgcatgattcccagggtaaacaagggaccttcaggtaattcattacacagaaatttcctggcaagagcctggccatgacctgtggcaaaatgggaacagagagtccccggggtcaattctgaggctgacttacagtgtggtctcagaactgccctttaggcctgagttccgccacattccttgccgaggagagatgatcactgagtgaaatgtggggtggggactgctatcctcaaagctgctcctgcctggcggagggtattcagggaggactcggagcacagaccctgccctgccaacctcctagcctttgagtcaggacacatcactgaacctccccaaacctcagtttcctcatttgctaaatggaccatgacatttgcttaacctggaggctgcagggaaaatttcctgcatcaaaaataagagtaacgcctcccctcaattctttcccacatgccaggtactctcaggaggttctgcttatgcagatgtgtgtgaaagtattttgtatcgtcacaatctaaagagctataaggcatttttcttcttttgaatcgtagtcaaagtgccccttttcacagaaggtccacagggaagtcacagttaggtctgagccatgtacctcaatgcaggaaattatccttaccctggaagaggttcacagaagcaaccacaaggatggttaaatcctctcacaaaacctggcttcgggggacataacggatgctccacatgggtggctggaagacagtgcagaatctcggtgagttacaacttcagacggtcaggtcactgccattggggtgccatagagcacacagaccagactacctgcagccctggagtctgtgagggactcctgcctcttggcgtgagttccccctactcccaccctactgccccttacactcacacatacaaatacactctcacatgcgtgtacacaaactcacacacagacacacacacacttgcactcacacacactcactcatccacattcacacataaacatgcacatagctttcccaagcttgtcaagaatatcagagaaaagaacattctagaacacaaggtttggtcatgggaggaggcaggtgcctctctcaaatctcagccaggagaggcatggatgcatccaactctcccacgtagaagaattggaggaatggcaggggctgtgcagaggcaggagccctgctcctcactgggcattaagggagtggacagcatccaaaccctcaagaagacacggccatagattttgcacacaagttttttgccacccaactaacccacatgtgtacagcacacaccatgagcttccgcaggaaaaaaaaaaaaggggcactggcaaaaccgtgacttgaacatagaattactggcatatggactgtcttgcgtcagacccccatggccctgagtccccccaaacccaaccagatgaggtaggggactcagagtgtgagtttctggtgatttctggttgcttggctttccttaaggaactgtggggtgcagaagagaaagctcgatatcgcaggaaggcatggcagctcctccgggcatcactcaccgttggaactgatggtcccatcctcatatctcttgactagcaccaagtccacaaaatctctgggagaaatgagcttcatggcagcggagggagtggaggttctgcttacacacagggtctgccaaaccaaagaagcatgtagctgtgactgctggccagacatcttctcccaactcccaccccatccctcaaggtctgggaaaggtactagggctgacagtagggtggcactataaacagttaagatccagagcgagtcttcccaggaactgggtgtcatggaaatacacccagtttgtaagacgagggctgtgacacaggctgcccacagctgtctagctgcagaccagtgccatgctgaggtcacgtctcatgtgaccataagaggtaccatttattgagcacctagtaagagcctggctggacaaagctctcagttgtcccttacctttagaaat

SEQ ID NO: 17 - DNA, 3199 bp, Homo sapiens
tgcttaaaaaaacacaacaggattttcgaagaatcctttcttagaaaacaaacaaaaaaaccaaacaaaaacgtactttctccccactatgtttacaccacaggaagcgagagagctgctgccactgctgctaccacaggaagacacagcagggagaagccctagtgcctctgccggctgcccaggacctggtatcggcccacagaccaagtcctccacagagggcgagccagggtggagaagagccagcccagtgacccaaacatccccgataaaacacccactgcttaagaggcaggctcggatggactatagctttgataccacagccgaagacccttgggttaggatttctgactgcatcaaaaacttatttagccccatcatgagtgagaaccatggccacatgcctctacagcccaatgccagcctgaatgaagaagaagggacacagggccacccagatgggaccccaccaaagctggacaccgccaatggcactcccaaagtttacaagtcagcagacagcagcactgtgaagaaaggtcctcctgtggctcccaagccagcctggtttcgccaaagcttgaaaggtttgaggaatcgtgcttcagacccaagagggctccctgatcctgccttgtccacccagccagcacctgcttccagggagcacctaggatcacacatccgggcctcctcctcctcctcctccatcaggcagagaatcagctcctttgaaacctttggctcctctcaactgcctgacaaaggagcccagagactgagcctccagccctcctctggggaggcagcaaaacctcttgggaagcatgaggaaggacggttttctggactcttggggcgaggggctgcacccactcttgtgccccagcagcctgagcaagtactgtcctcggggtcccctgcagcctccgaggccagagacccaggtgtgtctgagtcccctcccccagggcggcagcccaatcagaaaactctcccccctggcccggacccgctcctaaggctgctgtcaacacaggctgaggaatctcaaggcccagtgctcaagatgcctagccagcgagcacggagcttccccctgaccaggtcccagtcctgtgagacgaagctacttgacgaaaagaccagcaaactctattctatcagcagccaagtgtcatcggctgtcatgaaatccttgctgtgccttccatcttctatctcctgtgcccagactccctgcatccccaaggaaggggcatctccaacatcatcatccaacgaagactcagctgcaaatggttctgctgaaacatctgccttggacacagggttctcgctcaacctttcagagctgagagaatatacagagggtctcacggaagccaaggaagacgatgatggggaccacagttcccttcagtctggtcagtccgttatctccctgctgagctcagaagaattaaaaaaactcatcgaggaggtgaaggttctggatgaagcaacattaaagcaattagacggcatccatgtcaccatcttacacaaggaggaaggtgctggtcttgggttcagcttggcaggaggagcagatctagaaaacaaggtgattacggttcacagagtgtttccaaatgggctggcctcccaggaagggactattcagaagggcaatgaggttctttccatcaacggcaagtctctcaaggggaccacgcaccatgatgccttggccatcctccgccaagctcgagagcccaggcaagctgtgattgtcacaaggaagctgactccagaggccatgcccgacctcaactcctccactgactctgcagcctcagcctctgcagccagtgatgtttctgtagaatctacagcagaggccacagtctgcacggtgacactggagaagatgtcggcagggctgggcttcagcctggaaggagggaagggctccctacacggagacaagcctctcaccattaacaggattttcaaaggagcagcctcagaacaaagtgagacagtccagcctggagatgaaatcttgcagctgggtggcactgccatgcagggcctcacacggtttgaagcctggaacatcatcaaggcactgcctgatggacctgtcacgattgtcatcaggagaaaaagcctccagtccaaggaaaccacagctgctggagactcctaggcaggacatgctgaagccaaagccaataacacacagctaacacacagctcccataaccgctgattctcagggtctctgctgccgccccacccagatgggggaaagcacaggtgggcttcccagtggctgctgcccaggcccagaccttctaggacgccacccagcaaaaggttgttcctaaaataagggcagagtcacacgggggcagctgatacaaattgcagactgtgtaaaaagagagcttaatgataatattgtggtgccacaaataaaatggatttattagaatttcatatgacattcatgcctggcttcgcaaaatgtttcaagtactgtaactgtgtcatgattcacccccaaacagtgacatttatttttctcatgaatctgcaatgtgggcagagattggaatgggcagctcatctctgtcccacttggcatcagctggcgtcatgcaaagtcatgcaaaggctgggaccacgtgagatcattcactcatacatctggccgttgatgttggctgggaactcacctggggctgctggcctgaatgcttataggtggcctctccttgtggcctgggcctcctcacaacatggtgtctggattcccaggatgagcatcccaggatcgcaagagccatgtagaagctgcatcttgtttatacctttgccttggaagttgcatggcatcacctccaccatactccatcagttagagctgacacaaacctgcctgggtttaaggggagaggaaatattgctggggtcatttatgaaaaatacagtttgtcacatgaaacatttgcaaaattgtttttggttggattggagaagtaatcctagggaagggtggtggagccagtaaacagaggagtacaggtgaagcaccaagctcaaagcgtggacaggtgtgccgacagaaggaaccagcgtgtatatgagggtatcaaataaaattgctactacttacctaccacatgccaagcactgtgctcag

SEQ ID NO: 18 - protein, 695 aa, Homo sapiens
MFTPQEARELLPLLLPQEDTAGRSPSASAGCPGPGIGPQTKSSTEGEPGWRRDVTQTSPIKHPLLKRQARMDYSFDTTAEDPWVRISDCIKNLFSPIMSENHGHMPLQPNASLNEEEGTQGHPDGTPPKLDTANGTPKVYKSADSSTVKKGPPVAPKPAWFRQSLKGLRNRASDPRGLPDPALSTQPAPASREHLGSHIRASSSSSSIRQRISSFETFGSSQLPDKGAQRLSLQPSSGEAAKPLGKHEEGRFSGLLGRGAAPTLVPQQPEQVLSSGSPAASEARDPGVSESPPPGRQPNQKTLPPGPDPLLRLLSTQAEESQGPVLKMPSQRARSFPLTRSQSCETKLLDEKTSKKISSQVSSAVMKSLLCLPSSISCAQTPCIPKEGDTSSSNEDSAANGSAETSALDTGFSLNLSELREYTEGLTEAKEDDDGDHSSLQSGQSVISLLSSEELKKLIEEVKVLDEATLKQLDGIHVTILHKEEGAGLGFSLAGGADLENKVITVHRVFPNGLASQEGTIQKGNEVLSINGKSLKGTTHHDAILRQAREPRQAVIVTRKLTPEAMPDLNSSTDSAASASAASDVSVESTAEATVCTVTLEKMSAGLGFSLEGGKGSLHGDKPLTINRIFKGAASEQSETVQPGDEILQLGGTAMQGLTRFEAWNIIKALPDGPVTIVIRRKSLQSKETTAAGDS

SEQ ID NO: 19 - DNA, 3312 bp, Homo sapiens
gccccaggagagcccacccctcccagagagccgggacagccacccgccgctgagactgaagaaatcctttgagattttggtgagaaagcctatgtcctccaagcccaacctccacccagaaaatactttaaaagtgacagtgaccctcagaagagtctggaagagagagagaactcctcatgctcttctgggcacaccccacccacctgtggccaggaagcgagagagctgctgccactgctgctaccacaggaagacacagcagggagaagccctagtgcctctgccggctgcccaggacctggtatcggcccacagaccaagtcctccacagagggcgagccagggtggagaagagccagcccagtgacccaaacatccccgataaaacacccactgcttaagaggcaggctcggatggactatagctttgataccacagccgaagacccttgggttaggatttctgactgcatcaaaaacttatttagccccatcatgagtgagaaccatggccacatgcctctacagcccaatgccagcctgaatgaagaagaagggacacagggccacccagatgggaccccaccaaagctggacaccgccaatggcactcccaaagtttacaagtcagcagacagcagcactgtgaagaaaggtcctcctgtggctcccaagccagcctggtttcgccaaagcttgaaaggtttgaggaatcgtgcttcagacccaagagggctccctgatcctgccttgtccacccagccagcacctgcttccagggagcacctaggatcacacatccgggcctcctcctcctcctcctccatcaggcagagaatcagctcctttgaaacctttggctcctctcaactgcctgacaaaggagcccagagactgagcctccagccctcctctggggaggcagcaaaacctcttgggaagcatgaggaaggacggttttctggactcttggggcgaggggctgcacccactcttgtgccccagcagcctgagcaagtactgtcctcggggtcccctgcagcctccgaggccagagacccaggtgtgtctgagtcccctcccccagggcggcagcccaatcagaaaactctcccccctggcccggacccgctcctaaggctgctgtcaacacaggctgaggaatctcaaggcccagtgctcaagatgcctagccagcgagcacggagcttccccctgaccaggtcccagtcctgtgagacgaagctacttgacgaaaagaccagcaaactctattctatcagcagccaagtgtcatcggctgtcatgaaatccttgctgtgccttccatcttctatctcctgtgcccagactccctgcatccccaaggaaggggcatctccaacatcatcatccaacgaagactcagctgcaaatggttctgctgaaacatctgccttggacacagggttctcgctcaacctttcagagctgagagaatatacagagggtctcacggaagccaaggaagacgatgatggggaccacagttcccttcagtctggtcagtccgttatctccctgctgagctcagaagaattaaaaaaactcatcgaggaggtgaaggttctggatgaagcaacattaaagcaattagacggcatccatgtcaccatcttacacaaggaggaaggtgctggtcttgggttcagcttggcaggaggagcagatctagaaaacaaggtgattacggttcacagagtgtttccaaatgggctggcctcccaggaagggactattcagaagggcaatgaggttctttccatcaacggcaagtctctcaaggggaccacgcaccatgatgccttggccatcctccgccaagctcgagagcccaggcaagctgtgattgtcacaaggaagctgactccagaggccatgcccgacctcaactcctccactgactctgcagcctcagcctctgcagccagtgatgtttctgtagaatctacagcagaggccacagtctgcacggtgacactggagaagatgtcggcagggctgggcttcagcctggaaggagggaagggctccctacacggagacaagcctctcaccattaacaggattttcaaaggagcagcctcagaacaaagtgagacagtccagcctggagatgaaatcttgcagctgggtggcactgccatgcagggcctcacacggtttgaagcctggaacatcatcaaggcactgcctgatggacctgtcacgattgtcatcaggagaaaaagcctccagtccaaggaaaccacagctgctggagactcctaggcaggacatgctgaagccaaagccaataacacacagctaacacacagctcccataaccgctgattctcagggtctctgctgccgccccacccagatgggggaaagcacaggtgggcttcccagtggctgctgcccaggcccagaccttctaggacgccacccagcaaaaggttgttcctaaaataagggcagagtcacacgggggcagctgatacaaattgcagactgtgtaaaaagagagcttaatgataatattgtggtgccacaaataaaatggatttattagaatttcatatgacattcatgcctggcttcgcaaaatgtttcaagtactgtaactgtgtcatgattcacccccaaacagtgacatttatttttctcatgaatctgcaatgtgggcagagattggaatgggcagctcatctctgtcccacttggcatcagctggcgtcatgcaaagtcatgcaaaggctgggaccacgtgagatcattcactcatacatctggccgttgatgttggctgggaactcacctggggctgctggcctgaatgcttataggtggcctctccttgtggcctgggcctcctcacaacatggtgtctggattcccaggatgagcatcccaggatcgcaagagccatgtagaagctgcatcttgtttatacctttgccttggaagttgcatggcatcacctccaccatactccatcagttagagctgacacaaacctgcctgggtttaaggggagaggaaatattgctggggtcatttatgaaaaatacagtttgtcacatgaaacatttgcaaaattgtttttggttggattggagaagtaatcctagggaagggtggtggagccagtaaacagaggagtacaggtgaagcaccaagctcaaagcgtggacaggtgtgccgacagaaggaaccagcgtgtatatgagggtatcaaataaaattgctactacttacctaccacatgccaagcactgtgctcag

SEQ ID NO: 20 - protein, 625 aa, Homo sapiens
MDYSFDTTAEDPWVRISDCIKNLFSPIMSENHGHMPLQPNASLNEEEGTQGHPDGTPPKLDTANGTPKVYKSADSSTVKKGPPVAPKPAWFRQSLKGLRNRASDPRGLPDPALSTQPAPASREHLGSHIRASSSSSSIRQRISSFETFGSSQLPDKGAQRLSLQPSSGEAAKPLGKHEEGRFSGLLGRGAAPTLVPQQPEQVLSSGSPAASEARDPGVSESPPPGRQPNQKTLPPGPDPLLRLLSTQAEESQGPVLKMPSQRARSFPLTRSQSCETKLLDEKTSKKISSQVSSAVMKSLLCLPSSISCAQTPCIPKEGDTSSSNEDSAANGSAETSALDTGFSLNLSELREYTEGLTEAKEDDDGDHSSLQSGQSVISLLSSEELKKLIEEVKVLDEATLKQLDGIHVTILHKEEGAGLGFSLAGGADLENKVITVHRVFPNGLASQEGTIQKGNEVLSINGKSLKGTTHHDAILRQAREPRQAVIVTRKLTPEAMPDLNSSTDSAASASAASDVSVESTAEATVCTVTLEKMSAGLGFSLEGGKGSLHGDKPLTINRIFKGAASEQSETVQPGDEILQLGGTAMQGLTRFEAWNIIKALPDGPVTIVIRRKSLQSKETTAAGDS

SEQ ID NO: 21 - DNA, 108566 bp, Mus musculus
  misc_feature (1)...(108566): n = A,T,C or G
ccctccgccgccgccgccgccgctgctgctgctggtgctgtactgcagcttggtccccgccgcgggtaaggtgggcgcgggggacaatggccggggccgcaagcagccactttgcaagttgcggacgagttggagcgcgctccgggggaccacgcgccgggggacctcgcgcgggccctttgtctctcccgccggggcccctccctggggaccgagcccgccaggtgcggcgcgggcgggccctcacctgcccaaggctcgggacgccgggcgcgctcaggagtgcgcccacgggcatcgcgatggcccgggacaggcctggcctatcgcgaactactgggaaaacttttcgcgagcctgcttgcggcggccggcctaccgagccctgggaagtgccagaagttgctagctaggaagttcggagagccctgcgcggggcggcctggccctgggctgctgtcgctttgacctgcgtgggctgtcagccttccaaaccgactgacacctgccaggtgtccccgtgaccccagtgacccatctgaccgctcgggcccccaagcggtggccaggcacccagccccgctgaccagtgcccagccccgagatcggttgcgtgggtgccttggtgtggggaggtatggttctgcctcagttggacccacctttagggaagtggcccgctcgggaactttctaacttttttttggtgtgtcctgaggggtggagctgaggtcaggaggactctcgagaaacgaagcagttggaaacgctacacatgttcttttaattcggagattgccatgtggtttttaaagcaaggctcttgccacctaaatcattgttttcgggtgtttgtgttttgtttttctggagtgtggctgtccaagggtccggcagatactcttgaactcccgggtggtggtgatggcagtttggggcggggtaggggacaacctcaggtccctttgtctgggccttattaaggcgaacagctgtccccctgtgtatttccagggtagacacttgagggaggtggctgggcctggctctgtgctcagattccctgggctgcagtctcttccacctatgtttggggggaggggtcgaggggagctggcttcatccagtcttggagctctcaagctcagccagagggctcttggggagtctccccctaaatttgtctccctcgggatcatgtttacattttcaggccatctctggtgttagcaaaacaaggcgaagacaaaactgtgacaggctgtgggaagtccaggccagttctactcttcccggaaatgcctgggtcgtgactgcagaaggggtatggggcagctatttgttttaaaggtggggtttgtaagccgactttcctgtcctaggtaggattgacattactctgggatcccctagcctgtcatctggtatcccaaattgaacatctttatagtttggtggtgtgtgcggcaaaaatagagtcgattattttaacattaggaagccaggccccaggagtaccagctgatggggtagtccaggcctaaaatggaagcaaagagaagaatcttcctgaagctcttatttgagtgtttttggctgtgcgacccccaaatgtctgtctgagattcttgctttgggagtctggagagaagggagtgagtgggcagctaattatttttcctgattgcttcctgttgcaaattgaagctgtgagcccacagaaaagcctttgttctagtggtccctgaattccccattctggaagccctaggctttccttctcaccgcctaaagcactcacttgtccctggaccagcctagcctgtctggccccctggaggaggttcctgcagttgtgggctgtctacccctgggagggcccagccagcacatgttgggttatattgggttaaatgctgagcagagtcccctctgtgcaagaaattacccaggcaacctgtttgtcctaagcttctctggggaaagccacctcctggccccaacatagttggaaccctttttattttgactacacagtgtcattactcaggcatctagcagaatttgcacaggggtgtgggggtggggtacagccaggtgaggactctgtcacctgctttgcaagtgggtgccccagggttggagcaggaggtgatcatctgaccaaggtgttttgttttgtttttgaggcatagtttctctgtgtagctctagttgtcttggaactccctttgtagaccaggctggcctccaacacaaagatccacctgcctgtgcttcctgagtgatggattaaaggcatgggctaccaccacccagctctatagggttttcatgtccagttgctgtttgtctttgggaggcttacatagcctctctgtgctgagtcctctcttctcttatatcgttcggtgggaagcatttggtacatgcagcccaggtctggggtagtggtggcagagctttgaggacagttgtgtgtcatggcctttgatctggcctgggaattctggagctgttgttacatggtttgggttttttttttttcctttttgtatgttcatatgtgtgcatgcctgtgcatgtaaaggtcagaggtcagccttcagtggttttcctcaggagtcgtcatgtgcatatggaaattaaaggtcaacccggggaagtgcttctcaagaaccatctaccttgttctttgagacaaggtctctcactggaacttgggtctcactgattgataaacctctgtgactggctctttacctgagtactgggtgtgtgtcccgcttgatagcacacactttcccagctgagctgtcttctcaggtctgggcttttcttctgtgttgtgatcttggctaccaagtggctgatggctttacctctgcagccacagatgaggatggggaaataatgccacatgggcagggccctggggcccacagccgagtgccagccttgccacttaatgtggggaggtaggcagatgactccatcttgcttctccccttagcaacatggtcatgaaaatcctttctgccactaatttagttacttcttaatggagtcatggctgccattatgtacccgtttttctggtgactggtgccaggttaggctttctaaggacagtgtggcatacagacagtctctgtgcctggtgtcatggggatgggcatgttggggacaggggctatgggcgaaatgaatcctgggcacatagaccagagaggttccagtctactgtgagaggtcagcttgtgctgtgtgacctagaggctaggaagcctctggggagattgaacaaggacgggaggacacgcaacctggagtcagtcagggagtctgaggtgaacagtgtggagctggggttattattattattacttttattactactactattggttacttttttaaaatttgagaacagagttgacagtaactgtgttcggcttgaaactagatgtgtagactagggtgaccttgaactactcacaaagatcttcctgcctctgcctctgcctctcgagcactgggattaaagatgtgtgccaccatacttggctctggaactgatttttttttttaaaagacttgtttgtattttaagttatgtgtgcacgtgtgtgagtgcagtttaccactggggttcagaagagggcatcgatcccctggaactagaagtacaagccattgtgaggtgcccaggtacatgctgggaccacactcaggtcctccgccagagcagaaactatgggagcagcagctgggttcactgtcatctaagattcacgaggtggaggccggaggggccccagctcaaggtcagccctctcccatcaaccaagaaataaaaattaaaaattgggattaaaggtcctggagagatggcttagtggttaaaaacacttaacctggtcttattagaggaccagggttcagttcccagcatgcacgtggcagctcacaaccatttgtagcttcagtcccaggtgatccatcaccccatcacccctctgtggcacataaataggtaaactgtgcatacacatgaaataaaagcaaatcttacaaatgttggggttggagcttacacctaggagttaacagctctcccaagcatgccgggcccaggcactggacttatgtggattacagtcattattataaaaccttttcattgttccaaagcaaaccccatttttattgaacagtggtttcccatctctttactacagtttttgttttgtgtctgggatctgcctgttctgggcacttttggagggtggtaggagtgatggtatctttctgtgttgcctaggctggccttgaactcctgggctcaagtgattccccctgcctcagcctcctgggtagttagcattagccagcttgtacctggctggatttcatatgtattctgtctgacatctttgtagcatgtggcagtccatccccctttttatggctgagtgatatctgctatgcagatagaccagagtttatctgtttgttcactggttgacttgtcctggttgtctgtggctttcagcaaatgagctgcaggggggctggggggggggacggggacggggacgggaacgggactgtggcaggaggttcagaagtgtgacaggcaatggggacaagctggacagactgtgctggcctccagccagtctgtgtttcccttcacatccatctgcatggagcctgggtcctgagagtgtggaatgagtctcctgtttggcctcccagggagtctcagagggagctggactctgtggtcaggaggcaccaagctggatcacttcttagcctctagaaacaggagtctgtggggcaggcgtggtgggagccgagggctgcacccagcttctgggcttcgtgactctgctcacatttgcttggaaagcctcacatgggctctgagccagccgcctggggcagagccgtccaagtgtgacgggtggaggcagctgtggagcccacaaggaggtagccccaggcctagctggcgggtctaccccgatttccttccagcctctggaaagtggcttgctggctcttagcctcagtttccacatctacaaaattgagctgatcggccagccttgccagcacctgtgggatctgtgaggcttgggaggacacagtgttccttcccttaccaccatagtgagggagatacttggaggccgccttggatacccaggctccctttaaagggaggctgagtgcaggctgcagagctgaacttcttgtcctgtgttgggcagagatgctgcagattagttcttttggggtggccaagccaaaactaaaggccccacctggctgagaggggacttgggccattgtgtaagtgtcctgtctaagtcatataggatttgtgtggcagatatagtgcttttgctagcgtagtaggtgtcctttggtccctgcactcagccccaagggatcgttcgttatgtagctctagccttgggcttccggcgcgtccttggctgctcctgtgggaatggttgacagctcagtgacttccagtgagcactgcctcctgcagaatggttggcagctcactgacttgcagtgagcactgcttgatcaggaggaccctggtccactgtggtaaccttgatttccagtggaacctgctgtgccccgaggggccctcagcatctcctgttttctgctcctcaagcctggggtctcttggccatggaccctttggaaggtttttatggtgacatgtgcccttttaggggtagaaggctgccctttctgggtgttttcctagttgtcttgtgagatgacaagttctgggggcatctactttcagcttgccagggtgccgtttaccttgtggctaaactgaggcatggttttgtcaaggaaggggactcagcctctctgggagtcttggggggtctccaggctcctccagaattgggcagtggctcctctcctagaaaggagcccatgaggcattgcatgccttgggtgtcagtgcaggtgtctaggacggctaagggacccgcaccccatcacggctttctgccttcatatggagccctggagtgtcctcctcttgtgcctctgttttcataaaggtaaacgtgagcgggcccattctctgaggtccttccaagcctagccaagtttttacctgctcctcttgcctggctctgttgcttccaatctgtcccttgcgagtgtagttggcaccacactggcctcaaaagtgttctctcaggttctttgcagcccttccagtatccctttcaggtctgttctgctgtctcaccagcctatggggccgcccaatctctgcattcttaaccctgggacccaccatctctagtagagcctgtctgtgttgttggttgcagttgtcaacgtgacacaatctaaaattgcttgagaagacagattgtctagatcaagttggtctgtgaacacgtgtgtgggcgattgtcatgatttccttaattggggtgggaagacattgtcggtgggaccattccctgggtttgggccctgggccatgtaagagtggggaaagtttgtctctcctcttgactatcaatgcgagcacctgctacaagttcccgccttaatttccctgtagtgacaggctctagccaggagttgttaaccaaataacctacaagttcccgccttaatttccctgtagtgacaggctctaaccaggagttgttaaccaaataaccctttactccctttgagttgcatttgtcagagtcccctcccacaccgccaatcaagggacgagttctgtccttcatttctgaacagtgtttgtttgtatgagtttggcctccaacagttacccacctggggccgggggtggggtaggtggggaaagtacagggccagctagaagcctgtacctgagccttctgcccttctgggggttctctcaacatgtggctgagccacactggactgtgctacgaaggtttggcagtcaccaatgtctgcgtcttaggcctttgcttacagtcagaaaatatcattttaaagatggttcagcgaaggctgagaggctgtggtgctctactgcctggtgcgggccctgccacccactgccctttgactataacaggtcacaccacctcctcttggtaacagtctagtgacagtagaagccccggtgagcctgagtgggcaccagggtgtgctccaagctggtgactgcgtgtttgcaggttggccttttctttggccactacttacacagctggaagcagggatggtctattaggagtgtcacaggagctagtggcagtccgacccattgtggctaaggtggacatctaggcatgtagagcatacttgaggtcgatcatcatgtgctggccttatgtagagccctgtctacagcctttcccataggtgcccacccagtaggggcactgctaggggtttcaggctgatcctagctgtgtgtgtgtgtgtgtgtgtgtgtgtgtgtgtgtgtgtgtgtgttttgaatccaaggcatgtcctcagcacacattctactgttgaatgtaccctaactcctatgtcttaatttagaaaaacatttttttttttaaagatttatttatttatttattatatgtaagtacattgtagctgtcttcagacactccagaagagggggtcagatcttgttaaggatggttgtgagccaccatgtggttgctgggatttgaactctgcaccttcggaagagcagtcgggtgctctaacccactgagccatctcaccagcccctagaaaaacattttttaaaaggaagatttatttaccgtattgtatatatgagtgtttgcttttatgactggcttgtgttacatgtgcatgtactgtccacagagagtgtagaatcccagacatgggagttatgcaggggttcggagctaaatcagtcctctgcaagagtagtcaatgctcttaatatataaaccatctctctactctccagccctttggatcagctccccctaccccaactgcaataaattgtgtacagcacaaaacttgccagtttttactgctccttttaacttaaaaagttatttatttacatgtatttgtataattgttttgcttgaatatttgtctgtgtaccatatgtgtgctgtttgtccacagaggccagaacagggcatcgaagcccctggaaactggagttagagttacagttgtgagctgccatgtggatgttgggaatcaaacccaggtcccctacaagagcagccagtgctctaaccactgaaccatctctccagccctcctcctttctagtttttgtttttgttttttggttttttgagacagggtttctctgtatagctctggctgtcctggaactcactctgtagaccaggctctgtagaccaggctggcctcgaactcagaaatctgcctgcctctgcctcccgagtgctgggatcaaaggcgtgcgccaccacacccggcctttctagtttttattacactttgtttattgtaggggagtggtttgcatgctgtagcacacatctaaggtcagagaacaacctgtgggagccggtactctctccttccatgtgggtacctagggatccaactcagggctcaaccctcagccccctaaccatcactctgacccttgactgtatctaagtgtgcagagatctgtgacactaatacaaattcccatcacccaaacagaaatattttacctataagatggtctcttcccatctctgctcacccctgcccctgataaaaatcttcctgctctatgttcctataattccccttccccatttttaaagaaagggcttctctgtgtagcccaggctctcctggaactcactctgtggaccaggctggcctcgaactcagagatgcctgcctctgcctcctgggtgctgggattaaaggcgtgcgccaccactgcctagctgatatttgctgatacttgtctttatagcctgttttatacctccccatgggcatagcttttgacctgtatttttgctatatttttttgcatgtgttcatctttttttttaaaaaagatttatttatttattatatgtaaatacactgtagctgtcttcagacacaccagaagagggagtcagatctcgttagggatggttgtaatggaccaccatgtggttgctgggatttgaactcaggcgggtgcttttacctgctaagccatctcaccagctccgtgttcatctttttaatgtaaatctgaccactctctcggcatctgtagcctgtctccacctgctgacctgttggaggcgttctctatactttgctttgactccttgttctttttgaaagccaagtggtggtgtgtgtggcaagcttgtagcttggtgtgggtattaattgtttggtgtatttgttccacatttccttcaggtctgtggctaatctttaatatcataaagaccttaaagcgcctttgccaagtatggtggtttttgactgtaatctcagcactcgggatgtcgaggcaggaggattaagtttgaggttagcctgggctacacagtgagaccctgtcccaaacaaaacaaaacaaccaagtgtggtgacacttgcctgtaattccagcactcaggagtctgaggcaggagggtttctgtgagtttgaggccaacctgggcaatatagtaagactctgtctcaaagaaacaaaaaatgttttgtataattgaacctgtcagttttatttcttaaggctgcatgtcttttcattctaactccagattctaaattctttcatttttcctgttcagtctctgttttattgctttgtattctacattcagattatctatcttcctgtttgttttgagacagggtctctctgtggagccctttctggcctggaactatatgtagatcaggctagcctccaactcctagaaatcatcttgccttgccttccaagttttaggattaaaggcatgcgctatcacacctgatttccctgctttttaaaaatgatttgttaaaaattataacttttgggctggagagatagctcaatggttaagagcactggctgctcttcagaggacccaggttcagcttccagcacccacctggcagctcacaaccgtctgtaacaccagttccaggggatccaacacctttacatggacacatatgcaggcacaacaccagtgcatataaaataaataaataattaaaactctaaactttgatgctttatgtgcatagtattttgcctgtttgtatatttgtatagcgtccacatgtggtgcccatggagaccagaacatcagatcccctgggactgcagctgtagaaggttatgaacttctgtgtggatgctgggaattgaaccctggtcctctggaagaacaaccagtgttcttaacacacacatacactcacacacacacacacacacacacacacacacacacactcacacacacacacactcacacacacacactctctctctctctctctctctctctctctctctctctctctttggtttttcgagacaaggtttctctgtatagttctggctgtcctggaactcactttgtagaccaggttggcctcaaactcagcaatgcgcctgcctttgcctcccgagtgccaggattaaaggcatgcgccaccactgtccggcttgtttttaactctttttgttgttgttgttgtttttatttttattttttggtttttcatgtcagggtttctctgtgtagccctgactgtcctggaattcattctgttgaccaggctggcctcaaactcagaaatcaacctgcctctgcctcccaagtgctgggattaaaggtgtgtgccaccaccgccccgctgtttttaacgtttttttaagatttatttatttatttatttatgtatttatttaatgtaagtacacagtagctgccttcagacacaccagaagagggcgccagatttcgttatggatggttgtgagccaccatgtggttgctgggatttgaactcaggacctttggaagagcagtcagtgctcttacccactgagccatctcactagcccctgtttttaactcttaatccatctttctagactaaaagatttttgctttaattatgtattttttcctctcttctctttctctcttctctctctctttttttcctctctctctctctctctctctctctctctctctctctctctctgtgtaggtatgttcaccttagtgtccacagaaaccagcaagtgctgtcataccccccggggctggagttacatttggttgtgagccacttgacatgggatctgagagctgaacttgggtcttctgtgagagcagtcagtgctcttagccactgagccatctctctagcccctgacttattttttaagtatatggtctgatatgggcatctagtcattgaatggggacccgccccaacaccttgatggaatggctagcctgtctctattcaactagattgccattcttccctgtgtggtgtcctgtccccaggcctgactactgatcctggacccttccaccaggtgtcctgtcatacctctctgtcctgatctttttgtttggagataactgtgcaaatctgtccccagtgttctgtttggaaagcttgttgactgtctttgggttgcacagtcagcctcttgacctcttcctttgatctcggtctgggagcagtagccggtgacttctaacaggtgtcggggcagatatgacgtgttctccagcccctggctgtggaagtcaattcacttgccatctgtggtagagcccttcctatcatctggggttttcattagacactatgttttgctttctagaggcagatagtgggatggtctggggacacgcctgccgccatgctcacctggagagctcccagtggaaggggtatgtaattaatcactaagcaggtgattgcgctctcctgtaaatcattagggaataaaaggcaagtggctcccagcacttccctgagctgtgcctctctgctagcttggatgggaagactgctcctgcctggcagagctctcaggaaattgctcaatggggccattaatagctgcccagtgtggcctagccagagctcagcctgggtgccctccagcctttgtccctgtcagcagcgtcagcttagatccttgcatctacagggggccaccagggcctggaactggagccagacataatgcataccaggtggctttgggcaagatatgctctctccatttgccttgggaggccaggcaacctttccatgttgtccccaacccaacttggtttctccaggagactgaatggtgtgagttagggtgtgaccacaccacctcagccctctctctgctcatgttggaagctcagggtggatgtcatttctaacccttttcctcacttagaccatctaggctctgaggtctcacccgtggccctgcagtgctcatttggtaaaaggtcagatgggtgatgatgttggtcatcatgctttctagaaccttcttgctgatctgtcttctgttctagacaaaataatttggggtatgtgtgcatgtatgtgtttaaacagggtctcttttatcccaagatgcatttcctatatagttgaggatgactgacttttttttttggtttttcgagactgggtttctctgtgtagccctggctgtcttggaactcactctgtagaccaggctgtcctcgaactcagaaatccgcctgcctctgcctcccgagtgctgggactaaaggcgtgtgccatcacgcccagctgaggatgactgacattttgatcttcctggttcagttataggtatgcatggccactccctgttttagtcggtgctgggggttacaaccagggctttatgcatgccaggcaagcactctgatgactgagctgtgtctctgacccattttctttgttccccttaaagatttgatttgacttctaatcatgtatgtgtgtgtttgtgtctgtgcatatgagtgcagtgcctgaggagtccagcagagggcattagctccctggagctgcagttacatgaagttatgaactgctggacatgggtgttgggaacggaacttgggtctcctggaattgcagttgagccatccctacacttcctcattttctttttttttttctctttggagacagggtttctctgtgtagccctgtctgtcctggaactcactctgtagaccaagctagacttgaaatcagagcactgcctgcctctgcgtcctaagcactgggattaaaggtgtgtgccaccactcctggctcccccattttcttcaaacccggttttcattgtgtctttaatgtctcagctaagctttccagttctatatcgtataacgtgggagtattttggcctggcagacctttcctacttctccagcccgaatgatctccacagggtccaggaccgtctgtgcatcaccacccctactctgggaagggtgatcttctgctatctgactttgagggatacctgtcctgcctcatggtttctgagcattgtgtgagacccaccttgctgcagcagttactgcgttggcagagccgtttgcgcggagcagcccatggctcccgaacacagctcataataagcagcagcctctgtgataccggctgaccttgtgagcccggactctgtgatgttgtgatggggcctggcatccgcaaacgtcgtagcccggactctgtgatgtcgtgatggggcctggcatccgcaaacgtcacatgatgcctttatttattcaatgacagtaccttatgaggctccggttggactcagacttctgcgtagctgaggtcttgaacgtctatcctcctgcctctgcctctgcctcttgaatcctgggaccatgggtatgtgccaccaagcccggctcatttttatcatgttcaaaaagctctctgtgacccttttaattttggaaaaaagaaatacttggacaaatgtttagttttctttctgtgtgtctgaatgcatgctgtgcatgtaggtgcccgcggaggcctgaagagggagtggatctcctggagctggagttagaagtgttgtgagctgctgtgtgggtgctgggaactgaatcaagtcctctgcaagaacaggcagtgctcttaactgctgagccatcactccagctcctttcctgtggtatttagaatgttggctttaatgagaaacatgttgccctttcttgattgtaccctccaggagttcctgtgcctgagttctggtcttgcctcctctccctgctcccgctctgaggaaacagttctattgtcatgctggtcagtccagaaggctctggggtggcattaaaactgggtattttacaatggagcatggttgcacatgtgtaaccccagcactcaggcagtagaaattgggtgatcagaaatttaagcttatcctcagttacatagtacatttgaggctagcctgggctacatgggaccttgccttaaaagggggtgaagggaaagcaatcacaacactgtcattggagctggagacaaggctcagctcactggtttctgccgtggtcccagggctgtgctgcctttgtccatgtggctgatacagacggatcagcagtggaggagcggggtcttcttacgttgccctgcgctgtcagaaggcttgagagcagcaggtagatggacggacacacagcaagtctgctcagtgagcactgtgggaaggtgacatctagaccgtgctcatttcaatcttgaggacattgtctgttagagaaaatctttctccttgggtccgtgctcaccgagtagaaccgggcggctgagcagagtagagcctgcaggcagaggtctctgggtgctttctccctttcttcctgagtgcccaattgcagaagctttaggttggtcttgtggaagatgtctgtctcctagctgcagacccttaggtgcccataaagcctgggtagtccctgtgaggagttgacacatgggacctgccatagtcagggtttctattgctgtgatgaaacatcgtgactagaaagcaggttgaggagaaaagggtttatttttatttggcttacacttccacattgctgttcatcaccaaaggaagtcagggcaggaacctggaagcaggagttgatgcagaggccaggttgggtgctgtttactggtttgtttactgtcttgttttccgtggcttgcccaggataaccagcctataggggccccacacacagtgggctggccctctctcatcaatcactaattaagaaaataccctagctaggtggtggtgactcacactgttaatcccagcactcaggaggcagaggcaggcagttctctgtgagtttgaggccagcctggtctacagggtaagttccaaaaaagccagacctacacaaagaacccctgtcttgaaaagattctgactgactgactaaattaatttaaaaaagaaaaaaatgcctatggctggatcttatggaggcattttttcattttattctcctttcaaataactctagcttggatcaagttgacataagaccagccagtgcagggccttaacctacattgttgtgtggtcttcacgtctgctgtgtttacagctctgagctgaggctgaggagtacatggatcctgcctagtgttatgtagggagctgccgaggcaggtaggccccacacaagcaggtctccaccagtcttccggacttcctatgtagcggggaagatgaggaacattgcctagtgatcgcatgttgttcacatagcttttacagaactgtcagcattgcgcacaatgcgccaatcttgtttttttgtttttgtttgttttaggtttatttttatatgcgtgagtgttttgactgcatctgtggctttgcatgactggatcccttggatgtagagttacatgattgtgagcagtcgtgtgggtgctggcaatggaactcaggttctctggaagagcagctggtgctcttaacccctgagcagtctctccagaaaacactccccctgtttttgagacaggatcttattagtccacctagactgtcttgacttgtgatcctgccgcctcagcctctggagtgcaggggtcgtaagtttgagtcccacacctagttctctaatgaatcaacctaagtgttgtggagagacagtcccctcccccaccaggcacctgagtcctctgggctgagttgccccaggtggtactttgcaaggttccttgcctttattaggcctcagtcttctcatctgtagcacaggtgactgcaaatccacctcctatggggactaaggaccatttggcagatagcagtctaggaaggcgggcaggcatgggatctgtgggggtcagcaagccaggacctgccccagaacagagccagactagagcttctctctggatttcttcagtagggagtttgggttatccttgggtctctgcacagtccgtgtgtcctggtgtccataacaggcactgtgggaagggctcctgggttcttctgcatcctcaccaacttctggacctgctgcccctgaggctccaagacagctagagtccagactcacatagaatcctccaggcacgtctgtgccctgataagcttggttgaggccagaaggccaggggctagaatttcatctctacgcccccagagatggtttgtgtctttcccttcattgtttttgcctgtccatttggccacatggtggacagaattgtcattggatcctgagttggcgcctgtcaccattttgggcggtggcccctgtgccttggcacctgggttcccactttttttccaggagctgtggcttgtttgaaagcagaaacttgcaagtttggctcaataaacagactttggagagcgatgataagtttcgcgggtttctgactcgtctctgcactacttaaaggaaacaggcgctggtacaaaggtaggcttgtttctgaaatcggttctccagtttcctctccgaggacagaacaatgtgatctttgtggccacacgggaaccacttccctctctggcccgcaggggagggcctgggccatcccaccttctcccacctccgtggaaatgcgtcagtgccagctagctggcaggtctgactgactgttgcagggttggcagtagttctcagggtgtggcaccgaggcaccacagcctgactgcagctccagtcctgggtccctaagttcatccttgctgaattcttaatctgcatcggtcttggggacacaaggactctgatctcttcctgaccttgagtgtcagtggctctttcccgatgctggggacagtacccagggcttcatatatgttgagcagacattgcagttccaagcctttgcatctagtgctggtcctcagtgaaaggggagcccaggctcaggtcactgtgcagatgcaccgtatggtggctgccaggaaaatcccggtgtccacagagtccacgaagcccggctgctcagcttagttttttgctaaagatgggtgagggtcccaggccatatgcagggtaaacgtggcacagcaggagccctgtgccgttcccagaagttctgtgtagtttgtgcttgcgctgcttttgatacttagacagtggtctgatgagaacaattcctgggtgtgtgtgcttcttacactaggtgtggttagtgacgatttcctttgtaaataaatgcgtcctcctttggaacacccagaaaacaacagattaaacaactgaggcttgtgctggccgctgcccagtggctgagatggaaccaccacaaccccaggatgagagatggggaaactgaagctcaaagaggtagagagtggaagcctatttgcattgtaaatggtttctttgaaattactttaagggtctgtgtctcttctacccctgcaggcaccaggtatgtgcattgtatattgacatacatgtagcctaaacacctgcatgtgtgttctcactttctgtcccctcctcttgcccctccccctcttcctctccctctctccctctttccagatcatgaaactcgccaaaggggcccctgggttctgctccttggtgtctgagacacggttaacgtatgtgaaacggacctggggacaggctgcaatgtcacaattatcctcttgggggagttgtctgatgggctgctcttcctatatatgaacctgagtggctgtcctgtacctggtagaacaagccaggagaccttgagagaaagctgccgctgtcccaaggaaggacttgcctccgtcagagtgtccaagcactcagtccccaggggctccgagtgcatctccgttttgggattgctgtcttactctttgccgtggtcgtgggccacttccgggagcctggcaggctgagagccatgggaccaagatggtgtgtaatcagaatgctatattttgtcgaaaataagaatgttagtaatgggctggtttctggcaagtcaaactgggactctgaaatacatatttttctctactctgtcctaaaccttctaattagtgaaaacgcacatttgcagacataaatcaatgtcacgatttgtcctggggatccctgagctggtagcattatgtggttgctaaattggggctttgggagtgtgcacatgcttgtttgtgcatgcacatgtgcacgtgtgtgtcagagggtgaaggttcaggagaagctgagtttcccagagaagtcctggaacctttcctttgggccacctagcaccacccccccacctacccccccccccccccacacacacatagactgttaaagttcttgagtgcagatgtcaccaagttaaactgattaacaggggaaatgactttcatggtaaaggacttcctttctggaaacctctactgcagagtgtcagtagctaggtccagcattctgcagaggctgttggcctggtgcctcctgttagacagttgagaccttagtcatgtgaagacgagccagctttggtaggttccatgagttcctggggttaggtgcagggtctactcagctggggtcatgcaggttcaacgttagactgtgaagtaatgtcccagagcacccctggtgatttgtcatctatactaggggaattacttgccaacagtcctctggtggccagataagacagtcactgtcctagcagcccataggatgtgagcagagtgccgtggtgaggcacaggtgagcctgtcgctggtatacatcagggttttggtttgtgaaaggagcaggaggtgggctggctgctggaagaggatcaagccagactgggcatctcccccgttctggattccatgtgcctctgcccagtctctcctggctcttctcactctattttatttctgactccaggccagtgcttttcaaaatatgtttcctggtttaaaaccaaaaaaataggacaaagaatgtcagttgagtgtttgcctaatgtgcatgaagccctggggttgattccccagcgttgcataagccagacatggtggaaaatgtgtctaggattgggagctgggcctagctcctctgtgtacacagcgtggcctaggtgagctgcttagcaataggctgtgggtgctcacctgtggaagggaatgcctccctcatttgggctcaggttgtaattggcccacagctggtgctggctctgctgtgggtgtaggtctatggccccaatgttgagtggcaggcttcagttgagagcaagtagctcagacttccacccatgtaatctgatggtcacccttgaagatgtccttggtaggagtgaccctctgttgtgtgggagtgaggactatatagttctggaagaggcccaggccactgtaaaatccctcagagagttgccagtcagactctcgacagctaccttggcaggccaggagcctttttctggtcctgagtctggcttgttgtaggacattcaagggtgggtgaacattgtcctaggccagcacctttgtgcaacagagctacaagcagggggtataaggacaattgcctcctgtcctcagcaaaggccacacacaccctgcctgtttcaggtccttggtggcctcatgtcaggcacagcctttcagtctgctgtggcacagtagagaccctctagcccatgccattctttagtgaagattgggaggctccatcctcctttcctgcactccacggtgtccaacccagcggccttgttttctctctttacatttccctttatgtattttatgtgtatgagtgttttgtctgcatgtgtgtctctgtcccatgtgcacacctggtatccatgggggccagaaggaaggtatcacagccctgaggatagagtcacagatggtcagaagccactgtgtgggtgttgggaattgagcctctggaagaatagccagtgtttttaactgctgggccatctctttaaaatgacatttattattattgtgtgtatgtgcaggcatgtgtgtgtgtgggggcataacgcatgtgtggaggcaagaggacaatgttgtagagtcaggtctcaagtgatttcttatttcctgttctacccccaaacctgctcccccatacgtttcctgcttgcctgcttccctgacctttgaaatgtggttcctgcccgggaagcttgcctaaacctcagagttaatgaaggcttcctctggtgccgtgagtgtgtgtgcacatgagtactcttgcctgtgtgtgtactggcatgcttttgcatgttgcattaggatgtgatcatgagtcccatgtctgagtgtaagaatgtgctagggctggagagactgggtgaagtactgagaggcagtgaaacagacgtgcctgtgcagagaggcagaggacaagctgcacccttcagtgggggtgtctggatgcagaggtggttgcggggaacagagagggttggaattggagtgtgaggacttggtgtgaagagtcgctctagttctgtggcctgcctgcacagacctgatgtaattctgtaagtggggccagctccccattctggccagtccaagatagggtttgtggtattctggaagcttcttctcactgcctcactagtacagtgggcactgctgggtgtgctcctgaggattccctaactctgttacaataagagctttcagggtcccagtcagcctctgttgtgggagatgtatgctgtccttttgagtgggctgtgcttacatttctggatgtgcagcctggccatggctgttttggttttgacacagatgatggtcttggccagctgtgatttgtgccctgctggacttatcagttatgcataccccaaagaggtgagtgtggctgcactggggaaggtgcacatgacagcatctgggaagacaggggtttcccccccagacctcggaaaccaggtagctctgagccaggtgtcctatcagccaggtgtcagggactacagagtgagaatggctaatgtcccagaggtggcctgatagaatatgttggcaactggggctgttctgggaagtatggatgggggctgtgggcaagaagaggaggttttgtgactcagtgggtccagagacctgtggatggatggagagatggatagatgggtagggagggctataggtagctcagctcaggaggaggtggggatgagagccatctcccatgtttgctgaagtctccattaaaggtaggtctgtggtagggtaggagggattacaagagacctaaggttttattctttgtatcaaactgttcatttccatcaatacaacattagattgtcactgagagcagccttagctgggatcgagtccctgtgaagatttgagattctgtggctgaggacatggctgccatagttggttgggtttgagtggctctgctactggccaagagacaaatatgatgggtcccagggcccagggctctggggaactgtggattagtgttggttcttccttttattttaattagttaattattttgttgttgttgttggacacaggatttttctacatagcccgggctgtcctagaactatatagagtaggctggccttgaactcccaaagatctgcctgcctctccctcccccagtgctgggattaaaggcatgttggcactttcttttacttgactagggatgtcagtggcacagcaatgagcactctctttgttcttggtgactggagaagaagagcagccctcattgcttctgttgagctttctctttggtccccatcatttatctgaagatgcctcttagaaaagcatagagcttcctggcttgtgcagcacagtccaccaccctagcctgtcttctagtgaatagctcccagtggccttcctgggagttttgtagactgtcattgttctgctggtactattaaaaaaaaaatctgggctggagaggtggttcagcggtcaggtgctagatgctctttcagaggaccagaattttagttcttagtagaagagatggtcaatagttgaaagcactaggctgctcttgcagagggctcaggtttggtttctaggacttgcatcgccaagcacaaccacctgcaactccggttccaggggacctaatgctctcttctggcctccgtgtggtaccgcacacacatggtgcacataaactcacacagaataataagtaagcaagcacacatgtaaatgaagtaaatgaataaaaagctgtactcctgtaatcccaggaatgtagagacagaagggacttgctggccagctgggactagtctgggcaaatcagtaagtgctaggatttgagagactctgtttcaaaaatcagtgatgggggaagagactaacacacacacgcacacacaatacacacacacacacacacacacacacaatacacacacacaatacacacgcgtgcgcgcacagtgtgtccatatgcattaaaaatagtctcagttgagttctctgggcagtgagggcagtgggaagctctgactgggcagtatcagatataagatggaagaaggtgagtggagctagaatggggagccctgggtcctgtggatggggtacaaggatgtgtataagtgatcctgtgagtatcccaagctggtagccatccagtgttcaggtgctgaggaggctgaggtgtgtcccatagtagaaatcatggatgtgagatgcatagctgcagcttgatgtctctttggggtgtgatcaccgttttctgtgttgtcttccttctttgagaccccagcctccttccagaaagcttgcgcagtacacccacgcctggtgccaccaccttggagctccttgcttaggtgctgtgtggccgtgtgaactatgcctgtgtgtgtatgctctccaactaagttggtagcttcttgtatgtgaacccttattctttctgtggcttggccttccccattgggatggtgatagaatctcctccccacccccatgcaccgtgtgtgcacaggctcctacacactctccaagtactcagaggtccaatgtaatgctttgtgattataaataaggcatggaccaaaattgctctttattttggggtctcagcaaagggttgaattacctggaattgggccttgtttggggtaaccacgcaaacagtgtaaaacatgggctattggagtggaaggcaaaccatctgttatgaattctatatataaatattggatatacttacatgggttaaaatgggattgttggcactggggttttcagagtctcaattctgctgtggcagggacgataaactaatcacagggcatggtggccaaggcagaagggggccagggctggtgtttttttctgacactgatttgatggggtcctgggagcgattgctgtacacacatcagggataattctgagctatttggctcccctccctgactgtgggtactgaaaatttctggggatatgggacatctatgttcttgctttgaaggggtatatacaaaactaaactgatggggacatcagggtggaccaagggagctgtcatatcataggggatttggcctgttcagctgtcagctgggtctttttgaaacattaactctttgctgtcatggttttgagacaaggtagtccaggctggccttgaacttctcatccttctgcttctcaagtccatgtcctgggcatgtgccatcatgccaggtcaaaacattagttttaggtctgtgtgtgaagaaacagtatcagcagagtgttcttgctttggatctcccatctgggagccaggccagaatgaaacccaggaccccaagtttaatgacgctgactctagcctggggagcacttgccactagcagcttccaggacagcatcctcacatttgtgacttgagcccccccccccccccatttcacagggaagatactgctgcccctgggtccctgtgtagagcatactctgagaccaccggtgccctccctagaggtctggattcttgccttgtcatagtcagcttcaaaaataatacatgcatagatagccccttagcaacagaagtgggttcagcattagcatttgaaaatacatatttaccaatcctgaggcagagatgcttctagttgaccaagcctttattagtccttgtcaccagttagtgctctttcatgccctcagtgtacatggattcatagtgatgtgggtgtgtgtatccacacatacacatgtgtgcagttatatgttcatgtaaagaccagagctcagcattggaaatcattcttcaggagtcattatcttgtttttaagatttactaagttgtgtgctcgtttgtctgcctgtttgtgggtatgtgcataaaagtacagggaccagaggtgctgtgtgccctcgagctggagccacccctggattctctccaggatcggcatatgctcttactgctcagccatttattttgtggtccttaatacagcaggtgctatggtattgtccaaatgctttgtcccagggtcatctttgtctcctagaggatttttcacaaactccctttcctttcttttcctttttcctttttcctttttcctttttcctttttcctttttcctttttcctttcctttcctttcctttttcctttcctttttcctttttcctttcctttttcctttcctttcctttttcctttcctttcctttcctttttcctttcctttttcctttcctttttcctttcctttttcctttcctttttcctttcctttttcctttcctttttcctttcctttttcctttcctttttcctttcctttttcctttcctttttcctttcctttttcctttcctttttcctttcctttttcctttcctttttcctttcctttttcctttcctttttcctttcctttttcctttcctttttcctttcctttttcctttcctttttcctttcctttcctttcctttcctttcctttcctttcctttcctttcctttcctcccgagtgctgggatgaaaggcaggcgccatcgcccggctcacgagcttttcttagtgatcttttaagggtcccaagtgtggtgcaagctgggccatggggcttaacccctaacatcactcttggtgtgacttggcacaagtgtatgcttctttatgaaggctgcagctctgggcctggagaatgtataccaggacccctagtctaccaggggctgtgcatttgagaggcatgggtcacctggtaggggaggaacccgtaggaccagcctcctgactgaggctggcactgtgtgtttctaccctgggaactttgcatgggttttaatgaggcctcccctaaccactgtatgtagtgtgcagccttctcctgttctgttcccactcctgtcctgtccctgactctggcccattcacagcattaacctgacagatgtcactacctgcttttggtctttgcccggtgtctgtttctccactggaacgggaaccttggaggcccctggtacaagcagcccctgcttgccagcctatgaaggcatcttggttttgccactgtggctctttttctttcactcccagaactttctttttctcctcctgagctttcctttgcagcttctgcccttgaaaaggagaggctggtggagccttggggtgatacagtgtctgtgttgtctaggattccccaggcgggggaggagaggagaagcagcctgccccaggtgagggtggggagccacccacattctggcctgcctcactgtgggtccctggggccactgccaggcctcttagaaggaaagctagctttccaggagtatgctgtgggttccccttaaaacttagggattaagtgtgtggtttctttacttttcagagctgggagcactgccccaccatctcccagtgagggttggagaaaaaaaaagtcctaggttacaaatccacccccagcctccctgtccctgcccctgccccctcccctcccatgtgcctttgaagagcacacctgaactactgaaagcaagttgaggtgaggaagtggtctttccagtttggggagcagtagagccagagcttggggatttggggagccttcctgcctctctatactggcctatcactaagggagcctttgggcaactggaaggaaggagtcttgggagcaggggcccggggtagccgtgcatgattctctttccctgggagctggttcctgtcctgcttagccatcctgaccctgtgctctgcccacagcctcaccgctcctgttgtttgccaaccgccgggatgtgcggctagtggatgccggcggagtgaagctggagtccaccattgtggccagtggcctggaggatgcagctgctgtagacttccagttctccaagggtgctgtgtactggacagatgtgagcgaggaggccatcaaacagacctacctgaaccagactggagctgctgcacagaacattgtcatctcgggcctcgtgtcacctgatggcctggcctgtgactgggttggcaagaagctgtactggacggactccgagaccaaccgcattgaggttgccaacctcaatgggacgtcccgtaaggttctcttctggcaggacctggaccagccaagggccattgccctggatcctgcacatgggtaaacctctgtttttctcctgctcctatggggaggcgcggggaacaggatttcttctgtagagtacctgaggcaggctgatgaggtgccttgggaagcagcccttgctgggaatcacctcccttccagatcctgaactgtaaaacatggcatgtttagccagggatggtggttcacacctacaatcctagcattctggaggctgaggcaggagtgttgccacaagttccaggccaacctgagctataaagaccgtcttaaaaatatacaggaactggggagatgcctccattggtgatgtacttacctcgtaaccaggaggatttgacttccatccatgaagaaagttaggtgcggggcgtcacatgtctataatcccaggaccgtggagttagagacacagggatctgtgaggcttgctggctgcctgcagtcaaattgcccagcccctggtcccagtgagagacaaggtgttttaaggtatttatattgccgtcttaaaaactccatgaccaagaacagcttggggatgaatcagtcagtatacttgatcagacaatactcaagtcatgccccacctctgagtaaagtcagggcaggacctcaaggcaggaacccagagtcaagagctaaactgcttagtggtttgctctccattggttgttcagattgctctcttgtagcacccaggaccatcagcccaggcactgaactgcccacagtgacctgtaccctcccccaccaatcatcagccaaggaaatgcttcccaggcttagaggccaatgcaaactgactgtagcttagctgagcaggacgttgtgtctcaatcaaacacacaaacaagggcagatgaggatgatgcttgggtttgaagcttagcatccttctgcactaggacaggtgacccaggtaagttcagggacctcccaccccttctgtgactgttggctgtggtggctctgtgtctggatgtagcacctactctgtgtattctggaagttacctatattggtgcagtcaactcactctgaccctggaaagcgcaggacagccatgaaggccactttgggaggggccaacagtcaaaccgtgaatgtccttcactgcagtctaggggccactgctggcttcagcatcaggccacattctacagtgttctagataggcatgtcttcgttcactccttgccattcctccagccttcttttctcagggttgactctggggtgggatgcacagacccttgtctaagctgccctttcgtggccatgaccctgaagttgtatgctggctcaggtgtgagaacaatcagacagactcacggactcacgtcttgggcaagacacacatcctggttttggcttttgcctagtgctgtactcagttgacattttagcttttttttttttttttgagacagggtttctctgtatagccctggctgtcttggaactcactttgtagaccaggctggccttgaactcagaaatccgcctgcctctgcctcccaagtgctgggattaaaggaatgtgctaccacacccagctttttttttttttttttttttttttttttttttaaagatttatttattacatgtaagtacactgtagctgtcttcagacacaccagaagagggcgtcagatctcgttatagatggttgtgagccaccatatggttgctgggatttgaactctggatcttcggaagagcaatcgggtgctcttacccactgagccatctcaccagccctttttttttttttaaagatttatttattatatgttcttgcgcatgcctgactcaccagcaagaacaacgctgcaacaggatccttctgcacacatttattgggagagcttgattgcagaggcgaagagaccccaagcccagaactggtgctgcttatataggcctaggagaggcatgtctcacaccgggattggttgtgcttgggttatgcttaccacctcatttgcatgcctacatctgattggttaacttgtctctcatctgattggttaagttgtttctcatttgattggttaacttatctctcatctgattggttaacttgtctctcatctgattggttagcttgtctctcatctgattggttaattttggttaattctcaaaacctcatcttggcaaaaaaagctttactgcctatgtatgcgtggtggccagcagaagccagcgccaccctgcaacggcacatgtggcttcccacaatatgttaagtacactgcaactgtcttcagacactttttttttcttctcactctggccccattgccttgctgtagctgtcttcagacaccccagaagagggtatcagatctcattaccgatggttgtgagccatcatgtggttgctgggatttgaactcatgaccttcgaaagagcagtcggggctcttaaccttaaccgctgagccatctctccagcccccccccctttttttaaaagctaatttatttactttacatcctgactgcagtctcccctccctcctctcctcccagtccgtgcccccaacattttagcatttgtaatgtccccagagcttctgagaaatgcatccaggaagcacgatgctggctgtggacctcccctgtgtgtttgtataaaccttgtaggaagtctgtgcagccagtccccgtgtaggttaggctccagctgacccatgcactgcctttttccactgctggggatcctaagttcatcttttggctctctagcaatggagtgctgtctggatcctgatagtgccaccttattgtgagccttttcagtgagctactctgggtgactttagctgccctggctgtggactgagcagaagcaggctgggagagtgggtgtggcctgtgcccaggcttctgagcttggctggagggtttgcgtgtggtctggcaggattgccactgcttggtctagggagtttgaggagcagaccaggtgagggcacactatgtggctgaagtcacttctttgtccagagctggcctttgagtatgtggcttcagaagctaatttatactttgtgcaaagggccaggaagtggttttgtgtgtgtgtgtgtgtgtgtgtgtgtgtgtgtatgtgtgtacacatgctgccacatatgagagtatatatgagaaacctgtgtgcaaatgttacgtgaatgtgtgtgaatgttttatgtgaggaagtctatgcacctggacaagtgtgtgcaggggtggttgtgtgtaagcgtaactgtgcctgtttatgcttgtatgtgagtgtgtatttatgagagtgtatgtgcacatacatgagtatacaggagattctgtgcacatgtatgaatgtgctttttatgtgagaatgtatatgcatttgtgtgtatattattatacataagggttattgagcttgtgcacacaaatctatgtgactgttaaggtgtgcatgtgtgtgtgtgtatatatatatatataaaattgtgtatgtgtgcatgtgtactagagagcatgtacgtgtgattgagtgtgtgatagagcatctgtggatgagtacatgtgtttgtaaagaagcttgcatgtatgtatgtgttcagttcatatgcaccagaggtaagtgggattttttgggggtgtgtgtggggtgacagactagcagctaccccctgtgggttccctcactcctcagctgcatagaacttaagtcatcttcctaggactaactctgttatctggtgaacaatctcggacctcaaatccccagggacaacagtaccctgacagtcttcccaggaggtgtgggccattatcccaggagagtctctgtggctaagagggattggtctgtgttagagtctgataaaatgggctcaggactagcaccccagttttcaacaggatccctctgtgtttttgtctctctctaccctggtttcctactcttcctgggacagaatgctatagttctaacctaccacatgcccagatgcaacgttcgtgaacatgggcaggaagctgtgggtttcaccattgccctagtgaccttacagggtactggtagggttgcggagaaaatgatataggcacagtgtgtttgagaggaatgagtgccaccaggtggcttctggctgtagagacaggatgaccagtgtaaggggcctggggcagagaagagtactcctgtgggagaggatgactcaaggtcttggctttgggttgagcctgtctccccatagcagttatagacggcagaggagggcagcagcttggcccaggcttgtagcaggttgggatagaaagtgtctagagtgagttctattctgaaggcaggagcagctgcgaagggcgacatggtgctatgtctgtgtccccatctatacagatatacagaggtgtgctgtgactttgtcatgccacatgaaaatactaagagctacccttggctggatgaatgctgtaacacgcatacccacattccaccacataaaagattatgcagttggaatttctcccccctccccctccccctcccttcttccctccctctccttccttccctacagttgtttaggccctgctatgacccatgtcttcctgtgctgttgtctcctctggagacttccttggatgaggggatcctgtcccagccaccattgagaagaacggctttgttcaaatgcccacctccatttaagtacatgcctggtgcctgcagaggccagaaggcattagatccctggaactggcgtttcagagggttgtgagctcctatatgggtgttgctaactgagcctgggccctgtatagaaaccagtgttgtagccgctgagccatctcttcagcctgttatgcactctgtccttacttgagctgctgtggcctgtgttatctctgggatcagtcagccttggtcctgtgggtcatgtgtacacttgcttctgacttcttcactagacgctctcctctgggtcacgctgttcctttcaaatcctgcccctggaccagtgttgaccttggcaatgctgccacagacaggacatctcaagcttccttcctgtgccctggataaataagggtgtacaagctgtggggtgcagctcggagtggggacagtgaaatgcagtgcaagagagaaacttggctctcccctcagcactgcggaggccctgcctgcccttgtgccttcctgtgtctcctttggagactttcttggatgaggggatcctgtcccagccaccattgagaagaacggctttatccaaatacctatctccgtgtgcttagctcaggactgggttagcaggtgtggcagagagggctctgaagctgggaagaccctggctcagcctggggaagccctgcagcatatctggatggggctaaaaggcctcctggcagaaatgcagctggtactgccttgaggtaacagcccggcattgcagccctgcaccttggccctgcctcagcttctgccttgcctcactgaggaggaggatgatggccttagtcctgccagcttgccctgcagcagtactggaactggcatgggcctgtccccactgagccagcagctctcccgttccccatttaaggaaacctgcaggcctcaggaagtggggaagaaatgtggtgtactaacctcatttccctgcctggccttagctctggctggaccacagcaccaaatgggaagcgtagaaacacgcttctcagtgggtggcaagtccctgggctaattccaggcctgtaggagtgggaagcacagggaaagaaggcagcgcccaggccatgtcagcctcagctgaggctgacctacctccagatgcccagagcatcaccccagttatggccctgctgatgcaggatgaagcatgcacaaagcttgggccttacctgcccacccaggctgctgtctagagctgctgcttgctgtgtgtgtgagacaagtccacgtgccagagcccccacttcctatctgtctaatgggggcagcaggctggctttcgcagtactggctggcacagagggtggtgcaggacactcaggagttaccctgtgtggggtgcttggcagagaaggggatattttcatgatgttcctatgcctacccttctagatgacgtcctcatcgtccctctagaaggtggtgatagttctggctcacctaggaccccctgctggggacacagcagtgagacagcccctgtgcccattattgcaagagctgagagctgaatctgcaagggcagcctgtgctcttatagctccagaagnnnnnnnnnnnnnnnnnnnncacacatacacacacacacacacacacatacacacatatatacaaaaatacaaaaaaaggtaagtatttttttaaaaaaaactgggcatggtggcacatggttgtaatcctagtacttgggaggtggaggaaacagtggggtgaggctagccttagctacaggagatgaggatggtggaggaagcagtggggtgaggctagccttagctacaggagatggaggtgatggtgaaggtttatacctctttcaagtatttcaagcaatatctctattttaattccttcacataaaaacctaaagtttgggtccctcaaacgatagtcactcgttatttctcacaggtctggtgggtgagctttcaggcctgggttagggattggaaccaatccctagatccatctgtgtctttccttttatcccgtctcctcactaggtacatgtactggactgactggggggaagcaccccggatcgagcgggcagggatggatggcagtacccggaagatcattgtagactccgacatttactggcccaatgggctgaccatcgacctggaggaacagaagctgtactgggccgatgccaagctcagcttcatccaccgtgccaacctggacggctccttccggtgagtgcctagtggccgaggcgccctccccactatatctgctgtcctcagggagttgaggctccttaactcaggccttaggttcttccctggagcccccaaggattgttagatgactttgggaacagagcatagttaccatgtctgatgtcacagctgatggaactgtttccacagcaatatgctgaacgttccttccaaactgtgtgagaggaacatacatagcctccgagatggcagctgtgcaaggcgggctctgagttcaatccctgcaggccacacgataagaggtagaggaccatttctttctgtttttgttttttctagatacggtttctctgtgtaatagccctggctgtcctggacttgctttgtagaccaggctggccataaagtcacagagatctgcctgtgcctgcttcccaaggctgggattaaaggtgtggccaccacacccagtctgagaaccagttcttggatctccacttagtgctgtgggtttcgagttcctcccatatacataccatacatatcgtattttaaaaaagagaaaagactacatctgacccatatctgcgcccagtttgtactgggaaatgagtaagaaaatctcagtgttcaggggctggagaggtgctcagtggttacctgcatttgctgtgtttgcagaggacttgagttcacttcccagcacttgtgctggaaggcttatctggtgccctcttctggcctccctgggcactgcactcagatgcacatacctgcacacacacaagtgaaaataaaataaaaatacatcttttttaaaaagatttatttattttttatatatgaatagctgtacagatggttgtgagccttcatgnnnnnnnnnnnnnnnnnnnngctgtacagatggttgtgagccttcatgtggctggtgggaattgaatttaggacctctgcttactccggccagccctgctccttcctggtcaactttgctcgcttagttcctgctggctccggctcatagatttatttattattatacagtacactgtagctgtcttcagacacctgaagaaggaatcaggtcttgttacagatggttgtgagccaccatgtggttgctgggatttgaactcaggaccttcggaagagcagtcggtgctcttaaccgctgaaccatttcaccagccccataaaaatacatctgaaaagcaaataaataaaaagttcagcgtttagactgtttgggattttagagttgccggtcagggcttagatctggccgggactagggcattcattgctctttgtcctgcctctgccatagtatctccagggcagcagcggctgtgtgactattatcatatctacagccttgctagagactgtgcagacagtaggtgcttgatcaatgaagaggacaggtagatgaattcggcctgttctcctacttggttgttagagcttcctgcttggtgtggccctgtgccatcattacacttgagaaatagctgtgacctttgtgtcgagttaggggtagtttactctgtgactgaatattacttactgagttgacatcaggtcttgggctcctcatgggaaggttaatctgacctttgcactggaggagctcctggcttggggcataggagctgctgtgaagggttcatcttgagtttgattaaaaaggcccacattccatcaattttgggatgatgtccagcctgtgtcttgtcatttgtagggcgagggtgaagatgcacatagggtacactggtcagggtctgatctgagatttggaaatcaggctagcccaaggacagacggtgggagcaagtgatctcagcatgatctaggctagcccagaatctggaaagctgctagccttgggcaagcggtcctgacaagagggtagcagttagtataacagatagcgataactcttgcattgtgtcagtgtccagggacatttaccattttgtttgatgttcacaacaaaccccatactacctcctgtatgatgataggcagggtctcaacgccatacagctggccagagcctactgcagagtggtggtcgttaaataaccacaagatgctggctctgctcaattccagtcctattaccagtgttgataatctcattaaacatgatgtccgctgtgtcggcggttctgaacacacagggctgagagtgcctccctgctgttggtgtggactgtcggacagaacacatctggctgagtcagcaggaagctctttgcacatcaggtctggggacccaggcttctcagaaactgtcaccaggtgtggctccatgcatttttcttttctaggggcactttgtccctttgtccaggggctcttacgtttttgtcacaggcacccaggctggctgggtgggcgctgcccgtgcatacctggaagggctgactggagtggccgagtgaggagagtgtgcttgcagctgcttccctttgatctgacagacacagcgggtctgtggtggcctaaaggcctccagcatagggcagagttggcctgagaggtcttctcctaaccactctgcctgtttcctacctactgcaggcagaaggtggtggagggcagcctcactcacccttttgccctgacactctctggggacacactctactggacagactggcagacccgctccatccacgcctgcaacaagtggacaggggagcagaggaaggagatccttagtgctctgtactcacccatggacatccaagtgctgagccaggacgcggcagcctccctgtgagtgtgagctggcaatgggnnnnnnnnnnnnnnnnnnnnnnnnnnnnnnnnnnnnnnnnnnnnnnnnnnnnnnnnnnnnnnnnnnnnnnnnnnnnnnnnnnnnnnnnnnnnnnnnnnnnnnnnnnnnnnnnnnnnnnnnnnnnnnnnnnnnnnnnnnnnnnnnnnnnnnnnnnnnnnnnnnnnnnnnnnnnnnnnnnnnnnnnnnnnnnnnnnnnnnnnnnnnnnnnnnnnnnnnnnnnnnnnnnnnnnnnnnnnnnnnnnnnnnnnnnnnnnnnnnnnnnnnnnnnnnnnnnnnnnnntgctggtacaggtaggatagggtagagatgggaaggatatagcccggatgtggggctcagtcaggtcagtggggcagtatagtcaagcagtagggcagagtggatccaggcagtgcagtagggagctggtagacagggctaagaagagatcagaccaagcctctatcctacagaagcacccacagagaggcacccctgcagagaagtgaatgctaggatagaaggaggagcttgtgtgtgtgtgtgtgtgtgtgtgtgcgcgtgtgcgtgtgtgtgtacatggtatatgtgagtatgcttgtacatggacagtgtttctgcatgtggttgtctaggcaggctagtacggtggacagggcctctctagagctgtttcaggctttctagggcaggtggtgccattgtgaaggcccagtagagccctgaagtgtaaaatacttgctcagagtcttacttctcagcctggggtcttatatggtagaatcttaatagaagtccctgacggtgactctgagtttctgtgacagactgagggggttggatgggaggcgggaagaggccattctaggctcactcagttgcacatgcaccaaggatcagtatttctggccacactttatagaaggtttgaatgtgggtctaggaactcaagccacaaaggttagtgtaggaggggtgggggaggtggtccctgaccctgtcaagagtacatagttcttgaactcttttgcttggagctgcccactcttcactgagtgtgttgtgagggcgaaggtcaactgcaggagactcagttccagttgacagagttgcaggggtgctgagccccacattcctgaggtagaaggagggtctgggaacctttgttagattcaactgtacagtggtcacagaagagcctgggggaggggcctaaatgtggtaacccaatgtggactgagtctgcagggtccaggcagattaaagagacagggtgtgctcaggagtccactaacccagggttcccaggcatggctgcctaagcggtcctgagaatttccatggaagcatggcgggtgacttttctggggaaagtagcatcctttgaaagtttatcttcttgttggagaaagcttagcttggggaatgtgccctgcagggcagggcaggtctgggatggtttctgagaaattacagaactgctgctgaggctgaaggccctccatggggggtggtctgagtgcggttaggtaggactaggaggacgagtcatggtgtagggctggagggacatctgacagttgtcctgtaggatacatgggatgtgtaggatgccagcccccgtgggagggagtggctgggcagtggtgcgctcacagcttgtactgcaacttccttccatcctgtcctgttctgtccccaccagtccacacaccatgcgaggaggacaacggtggctgttcccacctgtgcctgctgtccccgagggagcctttctactcctgtgcctgccccactggtgtgcagttgcaggacaatggcaagacgtgcaagacaggtgaggtggaacattggcactggcagggacaggtggggcctggcctggtggtgggggctgtcaccagctaaagtgacaaacatggcagcctcttcacaagggtctactcgatttagtgacaactctgacgctgagttcaccatcagctctgagctgagtttgggagttgtggatccctcatcaaaacagtgatatcctggtttagtagtgccttcagagtgctgagcacatcaacgtagggccacaccctgaaagtttgctgtgctgagttttatccaaaagctattaactgtaaaaaggaaaggatgggggcattagtgggcactgcccagggagctaaccccagtgtggagcccctgagctttcctggtctgtatcagttttgccctctggagcacagcagccactacactgagtgcagacatggttttggtttggcttccctgcatctgtgtcgttgatttgcttcttgtgtttcagttgttcaagtcttacctctctgttaacacttctatgcaaatggaggtcccagatcagccttgttgaaagttttctttctgactcagagagccagtttccctcctttttgaatatattttttcttttttttcttcgagattataacataattacataatttccttttctttttcctcctctaaacctttccatatatcaatccttgttctctttcaaattcttggctttgtgggccaatatctgttttttttttttttaagatttatttattattataaataagcacactgtagctgtcttcagacaccccggaagagggcatcagctctcattacgggtggttgtgagccaccatgtggctgctgggatttgaactcagaaccttcagaagagcagtcagtgctcttacttgctgagccatctcgccagcccgtgttgttgattttaagtcagggtctcactatgtagctctgactgtcctggaacttgttatgtaaactagactggcttgaaaaatcatggaaatctgcttgcctccacttcctgagccttgagctccaaggtgtttgccctctgatttcactgcttaattcacacaactttcggctcaggcctcgcttttcatcactgattgcttctgggttcctggtgtagtcagcattctcacctccaggaaatggacttctgctgtggtgcctcgggtagccccttctggtacctacgtacctagaggatagttctccgggttggctctgaggcttgtcttatcaggtcctgtgaggagcacagccatcctgaggctggttctcctttattttttctggggacagagcctgcttccctcaccattggccctctcccacggggaaaggtcagggaggcagctgccttccatattgcctggtctaagcagcagcttccttgaggctgtctcctgatgtcagtgtgtggggttgaagggatgtccttactcagctccagctgtggttcaggcatggggtgtgcctctgagggtttcctggcccctgctgtgctctgcagtgtggacttagattgtaggtgcctgtggtatcagaggtcaggatgagcagctggccctggccttcctgtgagccaggttcctcagtgactcagatgtccaggggtcacaggttccactttcctaagaatcctatctctactagctgtgaaaggcactcctaggaagactgtcagagaatgccgagcgcacaggacaaagcatttgtcacccagagtcctcctgtggtggaagtgtgcgagaggctgaggacatcgctgtagtcagtggacttctgtatgctaaatccatactttttccactttggctgaagatgccctgactgtagtattgtgttaaaaggagggagatgtctccagatgagagaaaaggcgcatgtctggttaggtttctatggctgggataaacaccactatcaaaagcaacttagagaggaaaggttcatttgtcttacaggtcatagtccatcctgacgggaaggaaatgaggacaggaactgaggcagaggctgtggaggagcctcctcctggcacctcatgcttcctcagcttgctttcttagataactgaggacagtctgcccagggatgaaaccggccacagggcactgagccctcccattaaggaaaggctccatacatttttctctactttaaaaaatcttatttacgttttgagaatcttatacattttgataacatttctcttcttgtaactgttcctagggtctccccatcttcctacctatcctactgcatattttttctttctgttaaaaacaaaatacacacacacacacacacacacacacacacacacacacacgactattgagtctgatttgtattggccaactactcctgagcttgcgggcttccttggcaagcggttaatatatccagtgttactccctgaagaaacctgactttctcttccccataacctctcagttgcaatgagcttcttgctagggtgcgcctcacgcctgctcccccttctctgtgctgggattctgtctgacttgtcctcgcgtgtgccatcagctcgtgtgcatcttacctgtcgggtctggagagtgctgtttgcgccatatctggctcctacagtctttctgcctccttgtctacagagatctctgagttttgagaggaggggtgtgaaaaagacacccagtttagggcccagggtttcaatattggagacagttttctcaattgaagttcccttttctcaggatgactctagtgtttgtgccccagaatgggactgagagactaatgttttctctaaggcgggaattcctagccttgcctccttctgcacttcctctgtgtcctcatcccttggacagttcctaggctgctagggtggagaaagaatcaaggatccagaagtaggttgggatgtacctctgttcacagactgcccagcaggcatgaaggctcagcttcaatcctagcaccatacaaatcaggtgtggccgggcgtggtggcacacgcctttgatcagcactcgggaggcagaggcaggcagatttctgagttcaaggcccacctggtggtctacaaagtgagttccaggacagccagggctatacagagaaaccctgtcttcaaaaaaagaaagaaaagaaaagaaaagaggtgggagtggccaggggctacctaaggatctccttgtgtctgtggcatctatgagatctctagtgttgtccatttgaggccaaatgggggaaactgtcccataagggaaaggcagatgagtagctagccctgcccagagggcgggcaggtccatagggaaaaggagagggagcttgggaagtgatgggcatggagacgatggggaccggggatggtagcgtgtcttgctctcaccaggatccaagtttctccctggtggtaaggaaactccctggctaccttcagcctctcctagccagcatactaggcttgagtctgtgccctggctctcttctttgagacagactcagcctccttgggctccggttcctttatctgcagcgagaaagcaagagcagcactctggagtggttggaggaaggactgaccacttggcaagtaggaactggacttgaatttgaacttgatctgggaaccaggcggacactcttgagaccaagagaacaattcttcccagacgtttggaatcgagttgatgccaaggctagctggtgccaggttgtggtggccgggctggagagatctcagcgagtacacagcaggctactgacctgctgcagaagtctgtgtttatcttggggattctgagtatacttgcttcccatctttatggtttcagggccagtgttgacctagggcagggacggtggccaggctgtcactggactcctgtgacacaataggcgtcgtagccactgacaggcctgatggagcaggctggagtgcggctgagtctgctctaggtggacacggagtaggtggcagccactaccacagctcccctcctcccgtgactgctggattcctgggcttcacttcatggagtcggagacgagagttctgctctgatctcagtttgagcaaatgaaaaccagcttggagtcttccttgaagactgaggtgctattcctatcaggaccccagttaatgggagagtgggaagcgtcccataaaccgggggcagaagggtcagatgcttgtgtggccattccctcaggatcctgagccacttcttccctctctgtgaggtgaggagagcagaccacccccttagataactggagattggatggaaggcctggtgcatatggaggccaccatttgacatagaaaaaagatcttctatatagcctaggctagcctatgtagcccaggctggcctcacattcatttctcctgacactgcttctcaagtactgagattacaggcatgtgccatcatgttaaaataacttctcacactggtggtgcaagcacagaccgcacgcctgtcctttgaactcaggagcttttgggtcctgaggctctgtgggcagggggacctttgccttcgggtctctgctttctgtccccccagctcttctgaggtggctgcagtgagaccagcagagcaagtagcctgctcccttcagctcagccgagctgtgaggcctggagtggctgtgttgtggatttccatagattagggtgactgtcagccctaggaagctggaagctgagagtcctgtgtgcttggcctgggccagcctccctccctgccccctctggagcagcctccacaggcagctggctttggtttcccccatgtttttccaattatgtggaatggtctaaaaacagcagtagcaggggccttatttgggagtcgccaccactgtctgtcctccgcagcctgcagctctgtcactgtcagcgtctccaagtcctgctctttgtggacccttcgccctggtgctctggcttttgtcacctagactttgggacagtgacttaacaacacgtatcctactttgtaggccacaaactatcagaccagaggactctggccaggcaaagctggccactggacctattgctgtgggtcgtgtggacaaggcctagcaagtcacaggatgggcatggattgggtaccccccccccccactccttcaagatgtagttttaacagatgcttaactgtcaggacggtctgggtgggggctgctgaaagaacagagggcctcactgttgggtctgatgggtagttgggacaactggagctactttgactaaccctcatatccagtcatccatccatccatccatccatccatccatccatccatctttccacccacccacccggacagattagccagatgggcaggcagccctcagccagggccaagaataatgggtgtgtttgttcccagagtctggctggctagtcacttatcagggaagtaggtcaaagggaaaagaaaggaggtcctgtgggggagtctgcaccgcagtcttgattggcattgactttgcaaacagaaggcagctgctgttctcagccatggaccgtgaatttttaatagcaagaaaattggatctcatggtccaggagactgcgtggtaagcctgtatgccgtcgtgttgtgcgtctgtgtaactgaggtgtaactgcatgagaaacacacattttgtgagtgtcgggtcagatcagttctgacagttgatacatgtgtgtaactgccaccccagcgagagactgttttcatcactcagaaagggcctctgggctcctacctctcatccccctgggaggcagggcacaggccatattcttagaaaggaaagctttccttggggttagggcacaggctggctaccagttgatgctttctggctgtggtgagcagtgtgaggtgtcttccacagactgacaatcgtgccatgaccacctcttgcttcatgctccccttactcctgtagcccactcccaactcctgcctggttacctgaggcccctttgtctttggagagcagttatgagttggtagggtcctggagagccctctaagctgtccagaggaacccccaccccaaacacacacacacacacacacacacacacacacacacacacacactctcacacactttctctgagcaagcgattccccgtattctgatctccatcacttagaaggagtcttgccaggtccagagtgactcagctgacacttggacctcctgcttgtcttagagaagtgtataggttccagctccttttggcctccagtctctgtgcatcttgtacctcttgtttcctggaaacaaattagctcctttctggccatgttgcctggacctactcccacccccacacacttctgtgcttccctggttggccactgctccaagcttgccttcagaggcctgctttaatgccatgtctccttggctctgtgtaggtcctctgagggatggcgtgtgcttaggttatgcttccatgtctgctgtgaaggacaaatggatgcagctccctcacttggagcttcccagtggaccagggtcaggcccggggaagctgggtacttcttggtggcaagagctgaggttctctggttatgtctgcgatctttagcagctagctgggatgcatctagtggggccagctttatcctctctgcctccctcagggacatggtgtggcagcatatggtttcctaggcctcctcatgtgcctgtgaagtctgggtttgtgctttatccacttaggaatgccacccgagtcctgcctctgaacttttcagctgtgtttaaatttatttattttgattttgtgagatcaggctgacctcaagcttgtggtggtcttcctgcctctgcctcgagcgcactatgattacggatatgcaccaaccacgtggtttctgtgagccatatggactgctgatagtcaacttcgacctaaagaaaaatgatgttttcacatagtcaagtgtagtcaattatttggactccagccagccaccatggatggtagtagtagtgtcccctcagggtgcagatggctgccatggcataggtctcagccttcgctcacttcttcctggagctgcgtgagggtctttggggtggttctgcttctcagatggggggccacgcacaaaagtgagagagcttgctcacagctgctgatgggaccacagctggggcactcagctcacagcctgttctacatacccttcccggggctccttctgtagactcctgatgcagagcacacagatgttcattaagccttaggcagctctaggagctacaggacagacagtgtgaaaccaatggctgtggctagagggatggctcaggggttgacactttgtacggatggagaacctcactcaggtcatttctcagcatgaatgtcctgccgctctaaacagactgggttgtttgtttgtttgtttgtttgtttgtttttaagaactgagccttgagcccagagctatgtgtactagacctttccttgtcattgtggcagacgctggacaacagcaacacaaaggagggtttggtttattctggctcccagctcaagggcccagcccatcatgatggggatggacagcgggacggatggctgcagggctgtgaggccactgctgcattgcagccagaaagtgggtgaatgcaggaacttagtttactgtctgagaccccagtgtatgggatggtgctgccatattcagggcgggtctcctctgctctgctaagcctctctggaaacaccctcacaacacacccagagatgtatctcattcccagtcctgtcgagctgaccatgaagaacgtggcacggtgaggtgtagccttctttagcgacctcaccagctgggttggagtctcctagccctctgccccaacctttaatttgcccaggcttaaagccattctttctgtgtcacctgtgatcttcattagagggaggagtgtccattgcctcagtgtttggggcctctgctggggctgagataggagctttccgatatgttcccagctcttcccagctttgatggagaactgtttgcacttgagtttcaggtcaagcggcttgttcaaggctgtttggtagagaatgaaggtggtcactgacatcaggccttggagcttacaccgactactgagccagactggtggtgtgagtacctgctcagtggcctgagggtcatggtggagagggaaagcagaggcatatagctgggaaccagtgagaggctgtgacaagagatggaagaggaaggagcacacctgggagaggcctaagattggctctgacttgactctgtgctggacagcgagtgactttgttgagagttatgctctcagcccagaactcaggcctggtgtctgtggggccattcctcatgagctcagccttcctgcacatgcctgttgatctgttcgaggtgagccattcaggcagtcacttgggtctcatgttaggagcagagcccaagacagctctggccacttcctttgggcctgtgaccctgtggtcattaggcagggtttcccagcgtacttcttggcattagcctaaccacttaccacctaagggggcagtggagaaacttaatcaattgctaaaaaaacaaaaagctcttggctacctgccagccgggaagccgcaaggccaggcagggccaggctgtttacagtctctctcgggctgcagagtgaatggagatctgctcagtcactgtactgcccacgcagcctcgggcctcagagctaaggaagaagctggccatgcctgctctgggggaagctgaggaggagaccagggcaggagtcatggggacagagaagggctggatcttagctttgggtcttgaggagaaaggagttggcagggcagagccacagagtggatgcctcccgggctgtgtgcagcctcacagaggggctgggccctttaggggcagcttggtaccttggtattgtggtagactgtgtgggagggctgggctgtcccctatagctgtgaggtagcaactgctctgcctgggatccctgccttctttcttgtattaattgggtcttgccatattcccaaggaaagagtattagttttcttgttgtggtgaggggaaaaaaccccttttccgtggagagattagcttttcagtgcccacagcgcccaggctcctgcagcaaaggtgactgacaagcctgggccacacctgtaggtggattggagtttcggctccatcctgcctcttaccctgctcctccctttaccatactgagaccccagaagccaaagcctcctggcctcgctcggttctggccccagggaagaagccttgcaccctggtcgcaatgcaccctggtcgcatccctcctagtctgaaactcttcccggtctacacctgaccccagttcagaagccgccttcctcatgacaggaaaaatttctgtttacctcagaaaggaaaccgtcaatgtaaaccaggagagaaatgtaaagtattatgtatgtgtgtgagtgcttttcttacacgtgtgtgtaccatgtgaatgtctggtgctttcagaggtcagaaggggtcagattccctggaactggagctccgagtgtttgtgagccaccatgtgggtacttggtactgaacccagatcttctgtaagagcagccagtgctcttaactgctgtgagtcttttctctagcttgataaatagcaacatttaaatgacccagaattcatctggctgaagctgcttgtaacaggtctacacgttttccactttttccccaacaagtgtttattgggtatttatttattattgtatttattttgtgcgtacatgtgctacagtgcacatgtggaagtcagagagcaactcaaaggcgttggttctggccaccactagggtcctggagcttgtacgaggttagcaggcttggtggtggacacctttacccactgagccatctggctagcatgattttcactttccccatgtattcaagtccaaatgcgtatttgtttacagtgtacgtacagacgcgagcgttgcttctcatagttcaagagcattttctatatcattaagtcttctccgggcctgatgttctgtgtctctgtaaacacctataagcatgaatgccccctgagatgtaaaatgaaccccttccctgcctctcttcctcctgtgtattgtgggatgtctggcctgctcgcagcttctcctgtcaggtgttggggtttttttgctcttctggagctgtgtgtcaggatttgtgtctgtgcactgcagaataggctttgtgttgtactcagggggcagatggttccaacctgctctccagaaagcctgggctggctgcaacgcttgaagaagctgcgacacactagatttcaaatagactttcctagcactccgtccgtcgaggtgccagtcactagaggccacttgttttcatagttcttgactgtgacctccctttcccttccctcccttcccctcccctcccctcctttctttccttattaagcaaaagaccttatgttacgtgtttgtgcttgtctgcatgtatgtgcaccccgtgtgtgtggtgatgatggaagttagagcttcaggaccccggaaatggagttcctgatcatggtgatcactgtgtgggttctgggcactgatctaagtcctctgcagtaccagcatgtgctcatagccactgagctctctctccagcttctcctttttgtttgattattgtatgtgcatgtgggcccgcagggcagtgggcatgggggaataaagggagtgggagaaaacctgcgtcccgccagagttctgttgctctgggcgggtggacgcgggaggacagccactcgctttccacacggcccggggtgggtgtctggctgtgggaagctacggacccagccagccactctgggccacaaggggcagtcctaggtagcaggttctcagtctggggcatcccagacaccgctggacaccacagaagagctgaacaaaatgagggccccagggcggaagggaggagagggcagggagacagggcgctgggtggttcccacttgggtgagactccttggtctggtccgtgcaggaaggccttctggcgggaggttagacgaagcatggctggccttgattagcagagacagcctatggttttagagctttattgtagaaaggcagagagaaagagagaaggtagaaagagggagagaggccgactatggccacgtggagagagggggcaagggaaagagaaagaaggagggctagagatgagagtaagaaaggtgagagcttaaagagagagaggaggggccaagcagcccccccctcttttttttgttttgttttgttttttgagacagggtttctctgtgtagccctggctgtcctggaactcactctgtagaccaggctggcctcgaactcagaaatccacctgcctctgcctcccgagtgctgggattaaacgccaccactgcctggcttccaagcagccccttttatagtgacctgggctaccttgctgttgtcaggtaactgtggaggtggagtctagccagaatgccaggagcttggggctttatctgcatgactgatagtcacacacctctcctgagggggctgtgggggcagtaacttcggcaggagtcaggggtccaggagacatgattgaacaccttcccatgtaggtgggaatcaccacccattgggtccccggggttccagacctttgcttggctggagagcaggctgtctgtgagccctcttgcttcagtgctgtgactggattctttccctgaggtgtttggctcttcccggtcccccggtccctcatggaaaacctttgccacccttgttaaagaacctcagatcaacccttcgagcttctttccttctagcttttatatgagtgctgcagtctgtctggctgtctgcgtctgtggttggaattctgctgcactgcacacacagcatgctatttgcttgtggctttcttaaggacaggctgagtttggagctgcctagtgccctgtgtgtggcgggtccttagcagagtgtggcctatgggatggctctccccgcatatacttaagagcatgtactgtccaccatgcttcagagtgagccctgctcactgcccagctgtcccttctgcttagagtctctgccttccagcattgcccgagcctcctcctgaatctcttatcccaacatcctgtgtatgagatccagtttgcacaccatgcctttcttgaggtaatcaaagcagagacatggtggatttggtgggtccacagagcagtgccctcctgtgagaaagaccgtagagacacacagtgcagtcggctgtgtgaaactggaggcacggatcagagtggttggcaatgaaccaaagaacgccaagtatttccggcaatatcaggaactgaaggaggcaggaaggaccctcccttagagcccggggagggagctagccctgctgcacccacaccttgactcttgacttcggaaccccagataagggaaggaataaacttatcttggtaaagtcacaggtttagggtgtgaaggctgagccctgtgcctagcccctggccctacctgtgtgttcctgggtgaaatagagaaagacgccaggtgtctgtccacacagctaggtccaatggctgtcagtgcttcaggagagggcaaggcttcatttttggtaaagggccttgccaccaattttgaccacctcagttagatccttggaacccaaggtttcttctgttctacacacacacacacacacacacacacacacacagacacacacacacagacacacacacacagacacacacacacacacacagacacacacacagacacacacacacagacacagacacacacacacacacagacacacacacacacagacacacacacacacacagacacacacacacagacacagacacacacacacacacagacacacacacacacagacacacacaccacacacacagacacacacacacacacagacacacacacagacacacacacacagacacacacacacacagacacacacacacacacacatacagacaaagaaaaggaaggaaggaaggaaggaaggaaggaaggaaggaaggaaggaaaaaaagaaagagaaattttaaaaaaatcaagtatttactcaaacttttagtttctaaactgtttgtttccatgatgtttaaacaggcatcatttactggttctgcaggcaccgagcagtaggcaggcctgtctcctttatgctagcattgtcccttgtcctcctgcactactccaggcctacagttacgttatgaccgcacttaaaaacatttatttgttatttatttatgtgtatgagtgctctatttgcatgtatgcctgcataccagaagagggcatcggatcccattatagatagttatgagccaccatgaggttgctgggaattgaactcagaatctctggaagagcagccagtgctcttagctgttgagccacctcttccgcccctagccttacttttttttttggtttttagaggcagggtttctctgtgtagccctggctgtcctggaactcactttgtagaccaggctggcctcgaactcagaaatttgcctgcctctgcctcccgagtgctgggattaaaggcgtgcgccaccacgaccggccctagccttacttttttttttttttaagatttatttattattatatgtaagtatactgtcactgatttcagatacaccagaagagggtatcagatctcattacgggtggttgtgagccactatgtagttgctgagatttgaactcaggaccttcggaagagcagtcagtgctcttacccactgagccatctcgccaaccgcctagccttacttttaaagatccttctcagagatcagccatgggcaccaccagccttggcaaacatttggtgagaggctccttgcagctcccccttcctagcctgggctttggctagagccttctattatgagccctggaagcctgtgttatacctgtatgcaaggctgggctgtggtcctgtctcagtgtccctgatgtggtttctgtatttttctttgtaaaagtaaaaatgctccaaaatgccatgcagcagtggggttccagaggacctacctgctcaccatgatggagttgcttgacagccatgggtttagctcagctgcgaattactgctatannnnnnnnnnnnnnnnnnnntgcttgacagccatgggtttagctcagctgagaattactgctgtagtctttctcagggtggctaggaagagtccccattgatgactcttctttagggccttgtgctgatttcgctcttagagggcttgggcctgtgtgtagcttggggacactctattggactctcccttgtgatggcagagaatagccctcacacccccgcagcccctcccctcccccttccctactccccacttctttttcatggctacactttgaaattgtgggttctttgttggtcttgctcactctatggtctctgctctgtcaccctggggtgtgaagggactgagtctgtcaccctggggtgtgaagggactgagtctgtcaccctggggtgtgaagggactgagtctgctttttctacctctttcttagccatagctggtctcagcctgggctaaggtagctacctataaatagaaactggtggtctggctgagctggcctgagtgagtacaagcatcttatactcactcctagttggcttaagggatcttatgttcccacttgctgctgtgtgcccttcagccaggagcttggcctctctgtgcaccaggttcctggcataatcctacctgatgtgaaaatgtgccttatatgggtgactacgttaggattatggggcaggattagcacaacaggtttcaatatggtttgggggtttccactggggaccagagcttcctgaagtgggagcactgtgtgaagccaggggacagttggcacatacatgctgcctgtcccacacagagaccctgacagttagtgcccttggtcccttcctgagcttctacgagcagacatctcttatctatcacattgactaagcctcctgactcctggcacagtgttagagccaggaagtgtcccaggtgcgttcggcctggagaaacaagcccagtgagtcggagccctgcctgatgctcacaccaggaagtttcagccccagggctgtgtctcctcgggcagggttgacccttgttctgggcttggcactgtataaaaggccacatagccgtccctacgagactgtgggatgaggacattgtcaacccctgcacagtgcaggggttaatggaatttgttgagaatggagccagaggaggaaaagtttgagattccaagttctgcccctctcccctcacagcatgcacctttgcaggcagcctggatttgggtcaagggtctctcacaactattatttctcctcctggtacctcagtttccccagccttgaagaggaagctgctgtgacttcttccttggtggaggagtcagcgcaagtgtcctgacctttgagaggacctcgagcaagccagcatgagtgtaggcagctgcctactgctagggggctacatggtcaggcatgactgacagcaggctgttggcttggaggcccgcaagcgagggaggtcccagcgctttccctgctgcaaaaggctcttaactgaaggtggatggccttgggatgccagaattcatcactggccctgacctccttggttctgtggatctagagaacatcaagggctggaagggatgactaacagtgatgcagctctgggaggaagctctggcttggccccagtagccttgggaggacctggaactcatagagattcatgctgggagtaaggatgtgcaccaccatgccaggccttttagtactgactcttgggccctggggactggaacatgtgaggggcacactgttggttcagaagagactctagtggccacataacccccgaacctacctgtaaaagtctgaacctcaccaagcagccagggtggttagagatggccgtcctgggccaagaaagaacagtcctgctgatgtgcctgaggctctctgaactgtgcccaaggtcccagagtgtcacagcagccgtggaaacagctttcacagcttccgtccgcaggctctcagtgtccagtgccatgttgatttttgacaactcacagtggctctgagatgtattggaagtgtagtccttgcttatctcctgtgagaccctggtctacagagcccacagtgcccactgggtctaggccactgtagaaggaactggagcctccgggctgggctcaggtggcttggctctcttgcttttggtctctgcctcagtcacctggtgtgtcgagtggtcctacgttttttgttagtgtttctgcggcaggcatttgggggcctctgagctttagagccgggctccctccatcccagtgctgtgcttgacagaacttacttgacacagatgtccatccctgtcagggagctgggtgacagagcaagacagggatgcctagtgtatggagaagaacagagggactggcagttggggtctggagccctgtgcctccagcaggattgtttttgtagagatgggcttgtggtcaggagagggacaagtggcagaggctcttacacacaggtggaagccagatggcctgcccgagggcttccagctggttattcaacctctctgtgcttcagtgttatctcctgtgaaacaggaaaatacagtgtcaggcccacagagcccctgcagcctctgttgtggtcctggctgagccatgcctgtaagcgccactgccggcccaggctctcgggcctgcctcagccacagcgatagacctctgacctcacagcttgtatccccacaggggctgaggaagtgctgctgctggctcggaggacagacctgaggaggatctctctggacacccctgacttcacagacatagtgctgcaggtgggcgacatccggcatgccattgccattgactacgatcccctggagggctacgtgtactggaccgatgatgaggtgcgggctatccgcagggcgtacctagatggctcaggtgcgcagacacttgtgaacactgagatcaatgaccccgatggcattgctgtggactgggtcgcccggaacctctactggacagatacaggcactgacagaattgaggtgactcgcctcaacggcacctcccgaaagatcctggtatctgaggacctggacgaaccgcgagccattgtgttgcaccctgtgatggggtaaggctgagacgacaggtgggctctgggatagtccttgctgcctatcctctgagatatgcagagtcaggactggtctaaaataagcatttctcaaagggcttgcagtgctgcggctgcagttggtccttagaccggacttagaggagctcagggccaggccatggggcaatggtgagaaagcccgagggctgggcaagcaagcataaggacccatgatgactcttaggatccacagtaaaaaatggacaaacaaaaaccaccgaagaactggaaggggctagagaggtcactcagcagttaagtgcttgctgtgcagataggaggataagctcggatccctggaaacccatatgaatgcctagtgggcatggctaaactaaggtggagcctctgaccccagcatctgtgcccagtggtgagcagggctcctgagctagaactttaactgaccagaccctgatggggagggtgccacagaactctgggcgtgatgctgggtggggtcgggaagagtctgcgcttagtgcagggtgtgaacctgtgtgaggggcagggccggtcaggagtggtggctacagtcttctgaacactgtaagcgcaagtgtgttccctgttacggtgacaagctggagtacagcaggagctgccgatgcctacaagtgctggtgccagtgctgtatcctgcctacctgtgggctctgccccaggcttttggtgcagcccattgtgaggccttgtaagccagagagtttgaaggggttatgtgtagaggtccagaagtgggggcagcagttagtgtggagtgtgggggaaggctctgtgctgctctttagtgaccttgggcccaatagtaggcagaagaatttgctccgtggtaatggccagagtgcagggttgtccccaaagaagatggtgacaaggagcactggggtcatttgaagctgtgggtgaggaagcagggattcggtggtcagctcaggtcgggaagcttaaggatctactcccagctacaccagaactcagtgaggtcgcagccccatggccacagaggtctcgtgtgtgaactgaggtaggagcagagatcaggcccttcctagcctgtgacttctgagcctgagggtccagggtaatgggatggcaagtgacgtgtgtctgatcccaggtcccaggaaggaagagtgtttcctacgcaggggccaggaggcaggtccgaggtagcaggaggcgaggctctaccctgagtccggagtggcctgggttttcttgcattgaaacttctgccctctgcctccaaatttttctggggtcaccatcctgagcatatgggagctttgcttctgtttctagaaggctccctgccgccctcctcccgctgttctggactctagcaaacaggtcagggacaagggtgccccagatgatctacagggtcactttcagaattttcctacggggtgggagctgagcctgccgccccctggcagccctgtgttgtcctgtgctgtgggggtgctctggtgttcctattgagctgtaggctaacaggctagggtaggtgtgtccctcagagttggggcctagcaagggcagaacagacactatcatgaccgtttgctttttctctagcctcatgtactggacagactggggggagaaccccaaaatcgaatgcgccaacctagatgggagagatcggcatgtcctggtgaacacctcccttgggtggcccaatggactggccctggacctgcaggagggcaagctgtactggggggatgccaaaactgataaaatcgaggtgagtgaggccccaggcacagatgtgcatggaggcgtgcacacatgtaagaagccaccctggagagtggcatcatggaaccagattctttagtgttgctctgaagcccagagtttcatgcagaggccaggcctggatgtccttcaccccatccattgtttgccgtgggcatcactgagtggctgtgccctgctgtaatggccaaagagagtcctggaggaaattgtgaggggttgggcctatgacttgtttggtagagtgcttacctagcaccacacacgtggggtagcacatgcctataatctgagcacttaggaggtggaggtggaggcaggaggattggagtctggggtccttgactgcaaagtgaatctgatcacctaggatattaggatattgtctcagaaaataagaaacaaaaaccaaaacaaccaacaaccgctcccccaaaacaagcaaaaggggtatgattacacacatgtctttaattttaacatggaaagaagaggcagacagacagatcttttgtgagattaaggccagcctggtctaaatagtaagttccaggctagccagaacactgagcccgatcttaaaaagaaaaacaaaatggtttatgggaattgttcagtgggggaatgtggctgctgggagttctattcttggaacccacatgctggaagcaggatcaactcctatgactttgttttagcctctacacatgagctgtgctgcacatgcatgtctgtctgtctgtctctcccatacatacatacatacatacatacatacatacatacatacatacacacacacacacacacacacacacacaaagaaaaaattttaaaagtttaaaaatcaaattaaatatgcaatctcttaaaaaatggtttctaatgtctcattcccacagactgagaggcctcggggaggtccgtgctggctttaaagcaggaggcaggaggattggtataaatttgagatcagctgagttacatggtgaatcctaggtctttttgggctacatagtaggatcctgtctcggaacaaaacaaccagaaactaccgggtcctcgggtatcctccatgccgcttaggaagtagatctgttgcagccatggctgtacgatgagtgtggcagccttgtaccacagcagctggtggtggggctgacagtccaggttccctgagcagcgccttgttcgtcagtgcctgtgtgtcttcagcagagcccctcgggtacttctgatggaacctcagtgcctggtgaccctgtcagcatcatgagtacttctttactttcctcggggtggacatcttcccgctttttctgataacttcttgctccttgtttgtggctaccacgatttgttgagaccaccattgaggacactctttatggttctggagtggcctgatatgggtggcttccaagagaagagactgcgtctgaaactgttttcctggggaacaggcgtcctcagtactggggaggtgagctgagggtcagaattggctgctgtccttctcttggggacagcgggagctgccttgtttatcatgggcttccctagtgatagtctctgttttgaaaaaaggaaaccatcttgttgctcatgaacttgaaaatgcctgtctcctgaaccagtaagccgaagccagtctcttcctccagacagctaaggaggctttggtaccctagctgccagtgggagcctgacagggatacccggcacccagagatgctggaccctgtagctgttgctctgtgctcccagcagagtagcctttagtacgttcagtcatagccactgcccatgcttctggtccccagcctctggggacacatttcacctttctgtctctgtgactggttttctgggtatacttcctataactagacttctcgatgcaccttttatgtccggctttgttgggaacatattcaggctctgtgctgccccgtgcacactttctcctcttctgtagccagtcacgtgactgtgtgggacacgccttgcagtgtctcctcagtcctttgctcttgtccatctgtcaggaatgagattcctgtctattcatgcacacattttttgtctgaatacagtttcttccttcccttgagtgtatgtctggtagagggattgcaatttaggtggcatttaaagtatgatttactttaccagggaccaataaactcttcacagtggatgccgtagttcatgatcctgtcagaagcctttgagagtctgaattctctgcttgctgttcccccacccccacccccaccccaccccccgtgtaagccataggttcacattaggtgttttccttctctctgcaccaatccaagtagaatctctagttgctgaactctgcccacctgcctctgcctcttgagaccagccactgtgacagccaccaagctggccatgctttctgtcccatgcagtctgctccccatcctagaaaacctatctctgggatcttctcttggccccagcatctctgggtctggagtttcctgaactctgcttggatctgtgccctcctttgggtcagaatgggatgttctctgaatccccccccccccccagcccaatcctgcctggtttgggaattcatggaagtgtgtgaccccagggaaggtggcagctgcagaattggtcccatgggaaacttgaatgacagcccctccttaggctcaagggtctagggaagaccagagaccacctgagctaattgtgcagatgtgtagcaactagtcatgatgctaaaaagaggagctggggatgtaacttcctagtgctcgagtatggcccttagcatgtacaacacacacagccaccataggacatttctgtaatttctattcccacatgttagagcaggtaagaactgcttactctcatttcttccgggtctaagaggacctgtgatccttactaaaggatgacatgaggtgtggtcccttagtcacacagaggcgttccccctgggaagctctgccactgtgctagcccagatccaatcttgtcctcaccctgggtgtggctggacctggccgagaaagctctggcctcttctcattttgcttcagggcagctcaggagtgggagccaaggcgtggccaccaggtatccgccacccgttttccccagtttctctgtgggcttctttcactgttctagaatggatccaagtaaagtgtgttcctactgcagctcactttaccatgcttgcaaagtttagtttgatcaataggactaggggtgtagctcgggtgataggatgcctgtctgtcgtgcatgagctaaacatggtggtgcacacctgtgatcccagtgttagcaggcagaggcaggaggagcagaaatggtgaactggaagccagcttgggctatatgagatcctatctcaggaaagataaggaaggaagggagaaaaaaaaaagaacacaacaggggcaaggcaagatggctcagcaggtgaagttgcttgtgaccaagcctgtgataattatgttcagagccttgcaacccacatgatggaaggtgagggctgattcctgcaaattctcctctgacttccatactcaaactgtggcacatgcactcactcacagggaggtggggcagaggagagggtgcagggatctgactgctggccggttaaccctggagcagtgtctttcctcgggtggggcttattttatcccagtcccagtttggcttgtattgtggaattagtcactaggtaacccagagccctgcttgtccatctcctccctcacctgctcttcctgagtctttctcccccaggagggggagctccctgtgctaatgggttgtgctggggtcaaccattcccccagacggtttacccatagctggtggcctgtgcaccacctgtgtgtcttgtaatgggaacataaggatgaactctagcagggaagtggttgtcagatgcactagggaggcagaggcaggcagatttctgagttcaaggccagcctcgtctacagagtgagttccagcacagtcaaggttacacagagaaaccctgtcttgaaaaacaaaacaaaaaacaaaacaaaagaatggactctgggctgtgtgaactgaggctatttgttactgccctctgttggtcacttaacaccattgaggcacctagctcagccctagctgcagcctccagccaagacccttcacacctcccggagcacctgcccctacctagttctcagcagctctgatggtctccaactctgaatggctatagattggagcccagctttggtctttagtttggtctttccgatgcaggagactgaggcccatgggctgcaaagactcattcaaggacattcaataaaagatcatgggatagagtgggggcgacccctggcagtaggcggcggaactacactgtcttacctgctgctcttcacctcttgctgtgaactgtagcagtacagtattcagtgctaggcctgccttgtagtttttgctgtctgttctcctgatgagcaagaagtacagccttgctcaggaggccagccaagctttgtctgtaattacctggtgtgtttcctcatccttttctctgtgcctgggatgtcaccattgccactgctgatcttcgtgggtcaccagagtcccactcatcctgtggctttaaaaaacaacaacacagggggctggagaggtggtttagtgcttaagagcactggctgctcttctatagggtctgagttcaattcccagcaaacacatggtggcatctgatgccctcttctggcacacaggtgtacatgcagatagagcactcatacataaaataattaaaaaaaaaaaaaaaaaaactaacaacaacaagaagaacaccccaacaaaaggagagtcctggggctcatgatggtcttgacatcgtcatgtagctgggaacgaccctgaccttccttccacctcctgagtgctaggatcatctgcgtgctctaccaagcctagcttctggtgtgtgggatcatgccaggtgtgcactgtgccagctgagccacaccccagcctaaatgtttgttttaatcggcatagtcttttctagaagaagacttggctcttctgtgccagcatggacaaggaaggaaaggaccgccggtccgtggggtttgatttatcactagaggtgcccagaagggacaaacctgcccagattgtggtttggcctggccctttgaaactgtgctgtatgcctacccagggcctaagcagacgttgctaatagatcccaggaagccttcccatagagctcgccctgtaagtagtccaggcccccactcatgcctcatcagcagtcagggagagaggactcttggcctgttcagtgtgcacaccagactacagaggctgtaggacatgggaagtgtcacttgtctggtaatagctggcctcttgtggcacttggttaggtgctgatgaagaggaggctctggggcagcttgagcctgaggcaggccccaggttggttcttggttggtacagcccctgcctatccagactcccgtttttgccctcacacaggtgatcaacatagacgggacaaagcggaagaccctgcttgaggacaagctcccacacatttttgggttcacactgctgggggacttcatctactggaccgactggcagagacgcagtattgaaagggtccacaaggtcaaggccagccgggatgtcatcattgatcaactccccgacctgatgggactcaaagccgtgaatgtggccaaggttgtcggtgagtcttggagctctgagccatggctccacttggccagttggccccaggaaaggtgacaggatcagacgtgggcttggtgtccagaagggtgtctcactctgaggatggacaagacaggaaatggtgactggataggtgagagtaggggtggccagaaagagagaagggagtggtcacagattagctgtgttgggaataactgtggctgatgtgtcacttcttgctgaatgccaggccttggtaagagcttcagtgcctgaggccagctgtatgctaatgctagttccaccccatgagcactggggatggagggacaaggccatttgaggaacaagtggaaacctgggactcagtgcatctgccttgcttttgtcatcgagcctggctgtgattctcaaatacacaccttttacctgacaggcaggatggtaaaagagtgtactttctgaggactccaaacgtgggtctgtatggtggggaccaaggaccgtttgacgaaggatgggctctgttccagtctgccactcccatgcttggtgccacacctgggccatgcttacacgtctcaggtagcctttgtctagtaaataaatgcaggaatagccctcagtggtctgggccactcttatagtcagcaggtaggtgtggtgtttagagagctgcctcagcctggagagtggctcaggagctcacagtgcctcctggtctcctggaagacccaggctctgttcccaacccaaccaactgtaacttcagctccaggggcatccgatgttctcttctgactttcttcagcatttgcacacatgtgacacacacacacacacacataataataaaacaagaaaacaaaagaagacaaaaaaggaaccaaatctatgggctggtgagatggctcagtgagtggaggtgcttgccgccaagcctgataccctgagttcaatgctcaggtcccacatggtggcagaaggcaccaatacctaaaagttgtcctcttaccttcacatgtgtgctatggcatgtgcatttatgtgtgtaagcatgtcacacgtacacacatgtaggcacacaagcaggcacacatgcaggcacatgtacacccacatatatcacgcatacacccatacatattgcattcacatggggacacacaagtacacatgtgtatacactcataccgcacactcacatacacatgtgcacacacacaggcacaagcacatacgctcatacataccacacacaaccacacacagtaaatgcgaccgagctgcccggctttagcagtaggaggcaggtggttgagcttgtatctgcaggatcaggcagggggtgcctggcagaagaagagagacagctgaacaaagacccatcagggaggcagcatgggtgaccagcttgtatgtcctgtcactgtggtaggccacatggcaacctgcagggctgacaggcttcatttcaccagccacctgtgaaaatgcagctggcacgtgcgggcaccgaaggccaggtccacctgcgtctattgggaagcaatcctgcccgggctgccaagtcaacttgagaagctgccccttcaccccgtttgttatcgataaggggaagaacactccttttgtagtttaaattcttaacataagttgctaaggctgtagtttggactggctcagaaaaaaatgactgataccttctgagtgctctaatcaaagacagatgtcattggctggccatggcacacctgcattttataggttgctaagggagtcagtgaattagggaacattctggaagaacaagaagaaccaatgtcatcaggttaggcgttgaggaggagcagttggcgagaggttgagttgtggcaccatcgcttgatgggctgatgtagctcaggctgggccatccctcgtttgcagacgatggtaccttgaagccttctgtactcagtttccactattaacagatgtggtgccctgggactggggcctggcagtggtagggctctgttgcattgtcgctgataactgactatagtagatgaggctttggctgctcccaaccagactttctttcactcctccttccggggtccccttttggtaggtggcaggaatccagtcacacacaactgtgagctggtgctcctcccctttgacagactgctgtcgttcagagctgtgcatttgcctcacaggaaccaacccatgtgcggatggaaatggagggtgcagccatctgtgcttcttcaccccacgtgccaccaagtgtggctgccccattggcctggagctgttgagtgacatgaagacctgcataatccccgaggccttcctggtattcaccagcagagccaccatccacaggatctccctggagactaacaacaacgatgtggctatcccactcacgggtgtcaaagaggcctctgcactggactttgatgtgtccaacaatcacatctactggactgatgttagcctcaaggtacctggcatgaggttgtaaacgcctgcagctttctatgaggccttgcctgtgaagctgctgctcagggctccatactgcttggttttgtttgttttttaagaactgtctattgtattagggctagagagatggctcagcacctgaggatgctcccttctcttccagagggtctgaatttagttcccagcattcccatcaggaggctcactatatccgatacttcagctccaagggatctagtctcctcttctggcctttgtgggtccatagtgcacttaaatgcacttaggcacacacaggtacacatcagatggttttaaaaattaaggaccaaaggagtggctcagtggttaagagcattggctgctcttctagaggatggatctagggtcatgattcccagcacccacatggtatttcctgagtgtctttaagtccagttccaagggatccagtgccctcctctggccctggcaggtactgcatgtacagacacattcagacaaaacaccctaacataaagtaaaagtcaatctaaaaaccattttttaattttaatttttttctgaaatggggtttctctatgtaagtctggctatcctggaactcattctatagatcaggctggcctcgaactcagagatctgcctacctctgcctcctgagtgctgggtgtgtatcaccactgcctagccccatttttttaaagttaaaactttaagactatatgggggttggagaggttgctcagtggttaagaacgctgactactcttctaaaggaccaggggtcaattcccagcaaccacatggcagttcacaactgtctgtagctcctaagatctgactgctcacatagacatacatgcaagcaaaacaacaatgcacataaaataaaagtaaatattttttaaacattagagtattgagactaaggagatattttagtggccagaaagcttgccatgcaaacagcaaatttaagaaccagggttgggatctgctggtgggcatggcagcctgcctgagatcccagcctctgaaggcagaggcagggtgtagctgtctttggctactttgtgatttttctttctcctactctttccactctttcaacaccctaacactagataggagagggaaaaaaaggatagaggagagaggcaaaagatccctgaataaagtcaggggctggaaagagggctatgttatcattagactacttcctgctgattagcgacatcgagttccatggtgaaattttgacctctgtcagatatcttcttctttcttctttgtgactacttaacacaactatcaataaccaacaaccttccctgcctcatggtgccctagccttttataccctttaaaaagttcccagaattccaaatgtcagacagtcacagaaattatgtgtaactggcaaaaattacagctgtgctagagcatgaggcaaatcatagtcagctgctgtggacagtctgaagcagccccatatcccacatctatgattaaaatgaaactatattataatatttctgtgattttaaaagaaagcaaaattctaaaattgtcactagagcaggggatccctgttgcaagctggctagctagactggttgtatggctccgttttggttttagttaagagactctgtgccatgagtaaggtggaggaatgatcgggaaagactcctaacaccagctgtgagcctttctgtacatgcatatatatgtggacacacacacagacaaaggaattatagtatcgaatataactcagttcaggctgataaaatatcaacacacctccttttgtttgtttctgtgttttttccgggctggggcaggatttttttgtggcgctctagctgacctagaacttactacgtagatcagccatccttgaactcatagagatccactcgcctctgactcttgagtgctgactctaaaggtatggtgcccacagtttaataagcaaataggaatgtctgtgtggtaggtccaggtgacatgcccatttaaagtgctgtaggaaatgcttggtgagccttggcactgccccatgctctcccatagccgtttacctcacagctggtcccactcacagtgtgggtgtcattgttctggatggggagcagggaggagacctgtctcctaaacggggcctgtggagtgtgctgattatgtaaatggttgtcctgggatatcgtggtgcctgtgtgtttaggagctgcctgtggctgttcttgtgccgtcaggctgaggaaagcggctacatctgggaggtgagagaaagctgaaatgctctttgttctttttgtaaaagttggctgatctctgctctaattcattagataactaacccacttcaattacctttcttaaaaaaaccaaaatcaagctagagagatagctcagtggttaagagctctgaatgcccttccagaggacacaggttcaattcccagcacccacatgggggttcacaactgtttgtaactcccaagatctgataccctagcacaggcatacatgcaaaccaccaatgtacataaaacaaaaacaaaaaaaccccaaaatcaaatcatttatcgttgttgggtatagtggtgcatgcctgtagcgctagtacttgggggtctgaggcaagagaattgtgaatttgagaccagcgtgggcgatcctgttccaacaaaggaaggtgaggccagggaggaggcgaagaaagaagatcacccacatcttacgttactgtttatttcttgtggttatttacttatttatttttaatgcttatttttatttatgtccgtcagtgttatatacactggtatctgtggcgatcagataagggtgtcaggtcccttggagttggaattatgggcagctatgaaacacctggcgtgggtgttgggaacccagttcaggtctctgcaatagcagcaagcactcctgacaactgagccatctgtctactcctttcctaattcttattttgtttgtttggttttttttttttttttttttttttttaagacagagtttacctatgtagtcctgctgtcttagaactcactctgtagaccaggctggactcctgcctctgcctccctatgctgggattaaaggcatgcaccaccacgtcagggatttttttgttttttaaagatgtatctattttgtgtgtgtgagtgttttgcctatttgtatgtgtgtgcaccacatgtgtgcagtgcccttggaggtcaaaagagtgtgttggattccctgaaacagacttatagatgcttgaaggtcatcatgtgggtgttaggaactgaacccctgagatccctccagccacgcccccttccctgattattaacagctcttagagcatttcttcttgtttgaaaaattctttgctgtatatatacacacccacagaattttattttacttatgtatgttgtggaaaatctccaaccccaataagcccatgcaaggaaaacccagttgtgtatttataaaccgcacgcctatattgggcagatatataccgttttcttccccagctatgaaatcctgctacttgcagtgtctccaggccatgtacttctgctacatcttccttccaacatctctccctctgtcctccatttgcaggctcttgcaactcccccccccccctttcttgtacggagagccagcctcctcactttcgcccagcgattggctatttgtcatctttcttagccaatcagataattaagatgtatgtgtatgtgtgtagtcctatgactatatgagcacatgtatgttcagtgctcccagaggccagggagaggtcagatccctctgaagtagatttgcctgagtttgtgagctgtctgacgtaggtgcagcgcctggcctctagttctcctgactgagcgagcagcaagtgctctgagctgctcagccatctctctgtcccagccctttatgttcttactcactcccagattcaggtgtgattacaagtgtttttaagcctcgtgataaaggtcatcttttttatattatagtcatctgtttggagactcggctctgtctcctgggtctgctggaccctcacatgaccctttccttcctcatcttcgcagacgatcagccgagccttcatgaatgggagctcagtggagcacgtgattgagtttggcctcgactaccctgaaggaatggctgtggactggatgggcaagaacctctattgggcggacacagggaccaacaggattgaggtggcccggctggatgggcagttccggcaggtgcttgtgtggagagaccttgacaaccccaggtctctggctctggatcctactaaagggtaagggctgcttttgtctgtcgtatgatgcaggcccctcccgtctgtccacagggcctctgcctcagagtggctggccccacagagcacctggtgcttgtcactagcctcaaaggtgccagggctgggaggatcctagaagattatctttctcattcttagaggggaaacttagactagctagcattgacgctgctgtcaggcactaatgtaaaaaggcagagacaacgtcatttgtaacacaagcattggagagccagacacaggcagattctcaggtttgctggctagccagtctagtcaaatcggcaagctccaggctcagtctgtctcaaaatatgacagaaaaatcagtgaggaagatactcagtgttaagctctggatggacacacacatacacgcacatgtgcacgcactcacacatgcatgtctgatgccagctcaggcctcctttctgcaatggtgaccagcctgcccttcatagatggcgctgaggcacttggatttatgactgttcagaaatgttggtttgcaagctcttggccttggcctaagatccacctaaggaggagccccaccttgggagctgaggcctggtgggccaggtctggtcttttctggtgctaaaagacccttttggagcagggcacatactcactctatagagcatccacactgccatggggacaactgaaccctgcctgaaacagaagctgtgagctcaggatggcaggaggaagacaaaggaccaggtgctagcaaaggccaagaaagtcttccagatcttagaatgacggtgtgggcagtctttccagatgtgcaggggcagaggaggaggggcccttctgtgctactttagcactgggcaggttttcactcttgagagaagggaccatcatctggacctgcccacatctctctctattccgtgagacacaccagcactcggccggcttagtgaagatgtcgcttgctttagcagtttagtctgatggcttttctgcatgtcctgtttggctgcacgtgggttcttcccataccctgagaagagtcagcagtgtggaagaagctaacccgaggtctggctcctccttacttactggggaaacatcactgaccagcttcccccagggcaagagggttaagtctaggaggtgttggttcctctctgctgtattctctgtgtttagcaaggattcaactaagctggcatgcccctctcccctttactggtatcttccagctacatctactggactgagtggggtggcaagccaaggattgtgcgggccttcatggatgggaccaattgtatgacactggtagacaaggtgggccgggccaacgacctcaccattgattatgccgaccagcgactgtactggactgacctggacaccaacatgattgagtcttccaacatgctgggtgaggctggtgacctcggaggtggggtgagggctgagtgacagggctctcgcttccccctccttatgcatgccagcctgctctgtccaatgagtcacttggcatcacaaaggcaaagacacaggattcttcccctctcctgcggcatgtccccatctagccctggtatccttactaggaacgtgttgggaatggatttccggactctaggtcccagccaaaccctgagccaggactggtattttaccttctaccacatgatggtgctttttattggagggaaactgaggctaggtatgtagtagggcttgcttgatatcaccctgcaaggactctttagagcttcccaggcctagatttggcctccaccagctagtagcaccaattccttctgcatccagacccctttctaacctatgtatttaaaaactaagctttgagtacatgatactttaaaaatctggatatttttgtatatgtttttactttttagaaataatgtttggttgggctgtggctcagttagtgcaatgcttgcccaccatgcgtaaagcccatgggttctatccccagcacataaactaggtgtggtggtgtaactcatacgcccaggactcaggaggtggaggcaggagcgtcagaaggtcaaagtcacccttggatatatgaggactttgaattcagtctaggatacgtgagactggatgcatggatggatggatgcatggatggatggatgcatggatggatggatgcatggatggagagctgtttttgaaacttaactttcctttaagtcatactgtatacaattttctgcttttttgtgacccccctatatacgacaaacatgttttcacatcataagcttgtctttgttggtaccatatgtgccatgattagaacatgggcttacagctcacaggctgtaacatgaagatgtgcagggatggacctgtgcctggtcgagaggctttgagatcctctaggctccttcctggcctgggaccttatgctctgctctgccagacttgttccatgtctctctctgactcagggctcacgcctgttgtatactgggtgcatcagtgtgccacaccctagtcaacaggtagcagaggaaaataggtctgccagtccactctgtcatctgctctcggaggggctgggcctgacctttgagatctcagatatctgttcttttccattactctgagtctccatggggatgctatagccatgtgactgtggggatcaggtataaatggcctgtgtgctcaaataggtaagatggagttaggcatgctgactcaagcctagagtcccagcagttggaaggctgaggcaagaggatcatcatgggccagctgaggctacacagtgagttttctagacttccctaagctgtagagttgaaatactgttggagtaaacaaacaaaggtcctgtctactgaaagctctcctgtgagtgtcttttggctgatatccagatttctctctgaggacgatgggtgggcttgccacataggtaggcaaccagtctacctatgcatgaggctactcaggcttccctgcttggctgagagtcctgtaaatcaaggttgactgactctcccagaggctccctcagctcattggcctgctagctctcttgctgacatatgtgctatgtccccgcacaggtcaggagcgcatggtgatagctgacgatctgccctacccgtttggcctgactcaatatagcgattacatctactggactgactggaacctgcatagcattgaacgggcggacaagaccagtgggcggaaccgcaccctcatccagggtcacctggacttcgtcatggacatcctggtgttccactcctcccgtcaggatggcctcaacgactgcgtgcacagcaatggccagtgtgggcagctgtgcctcgccatccccggaggccaccgctgtggctgtgcttcacactacacgctggaccccagcagccgcaactgcagccgtaagtgccttgattcccacttgctgcacgcannnnnnnnnnnnnnnnnnnnnnnnnnnnnnnnnnnnnnnnnnnnnnnnnnnnnnnnnnnnnnnnnnnnnnnnnnnnnnnnnnnnnnnnnnnnnnnnnnnnnnnnnnnnnnnnnnnnnnnnnnnnnnnnnnnnnnnnnnnnnnnnnnnnnnnnnnnnnnnnnnnnnnnnnnnnnnnnnnnnnnnnnnnnnnnnnnnnnnnnnnnnnnnnnnnnnnnnnnnnnnnnnnnnnnnnnnnnnnnnnnnnnnnnnnnnnnnnnnnnnnnnnnnnnnnnnnnnnnnnnnnnnnnnnnnnnnnnnnnnnnnnnnnnnnnnnnnnnnnnnnnnnnnnnnnnnnnnnnnnnnnnnnnnnnnnnnnnnnnnnnnnnnnnnnnnnnnnnnnnnnnnnnnnnnnnnnnnnnnnnnnnnnnnnnnnnnnnnnnnnnnnnnnnnnnnnnnnnnnnnnnnnnnnnnnnnnnnnnnnnnnnnnnnnnnnnnnnnnnnnnnnnnnnnnnnnnnnnnnnnnnnnnnnnnnnnnnnnnnnnnnnnnnnnnnnnnnnnnnnnnnnnnnnnnnnnnnnnnnnnnnnnnnnnnnnnnnnnnnnnnnnnnnnnnnnnnnnnnnnnnnnnnnnnnnnnnnnnnnnnnnnnnnnnnnnnnnnnnnnnnnnnnnnnnnnnnnnnnnnnnnnnnnnnnnnnnnnnnnnnnnnnnnnnnnnnnnnnnnnnnnnnnnnnnnnnnnnnnnnnnnnnnnnnnnnnnnnnnnnnnnnnnnnnnnnnnnnnnnnnnnnnnnnnnnnnnnnnnnnnnnnnnnnnnnnnnnnnnnnnnnnnnnnnnnnnnnnnnnnnnnnnnnnnnnnnnnnnnnnnnnnnnnnnnnnnnnnnnnnnnnnnnnnnnnnnnnnnnnnnnnnnnnnnnnnnnnnnnnnnnnnnnnnnnnnnnnnnnnnnnnnnnnnnnnnnnnnnnnnnnnnnnnnnnnnnnnnnnnnnnnnnnnnnnnnnnnnnnnnnnnnnnnnnnnnnnnnnnnnnnnnnnnnnnnnnnnnnnnnnnnnnnnnnnnnnnnnnnnnnnnnnnnnnnnnnnnnnnnnnnnnnnnnnnnnnnnnnnnnnnnnnnnnnnnnnnnnnnnnnnnnnnnnnnnnnnnnnnnnnnnnnnnnnnnnnnnnnnnnnnnnnnnnnnnnnnnnnnnnnnnnnnnnnnnnnnnnnnnnnnnnnnnnnnnnnnnnnnnnnnnnnnnnnnnnnnnnnnnnnnnnnnnnnnnnnnnnnnnnnnnnnnnnnnnnnnnnnnnnnnnnnnnnnnnnnnnnnnnnnnnnnnnnnnnnnnnnnnnnnnnnnnnnnnnnnnnnnnnnnnnnnnnnnnnnnnnnnnnnnnnnnnnnnnnnnnnnnnnnnnnnnnnnnnnnnnnnnnnnnnnnnnnnnnnnnnnnnnnnnnnnnnnnnnnnnnnnnnnnnnnnnnnnnnnnnnnnnnnnnnnnnnnnnnnnnnnnnnnnnnnnnnnnnnnnnnnnnnnnnnnnnnnnnnnnnnnnnnnnnnnnnnnnnnnnnnnnnnnnnnnnnnnnnnnnnnnnnnnnnnnnnnnnnnnnnnnnnnnnnnnnnnnnnnnnnnnnnnnnnnnnnnnnnnnnnnnnnnnnnnnnnnnnnnnnnnnnnnnnnnnnnnnnnnnnnnnnnnnnnnnnnnnnnnnnnnnnnnnnnnnnnnnnnnnnnnnnnnnnnnnnnnnnnnnnnnnnnnnnnnnnnnnnnnnnnnnnnnnnnnnnnnnnnnnnnnnnnnnnnnnnnnnnnnnnnnnnnnnnnnnnnnnnnnnnnnnnnnnnnnnnnnnnnnnnnnnnnnnnnnnnnnnnnnnnnnnnnnnnnnnnnnnnnnnnnnnnnnnnnnnnnnnnnnnnnnnnnnnnnnnnnnnnnnnnnnnnnnnnnnnnnnnnnnnnnnnnnnnnnnnnnnnnnnnnnnnnnnnnnnnnnnnnnnnnnnnnnnnnnnnnnnnnnnnnnnnnnnnnnnnnnnnnnnnnnnnnnnnnnnnnnnnnnnnnnnnnnnnnnnnnnnnnnnnnnnnnnnnnnnnnnnnnnnnnnnnnnnnnnnnnnnnnnnnnnnnnnnnnnnnnnnnnnnnnnnnnnnnnnnnnnnnnnnnnnnnnnnnnnnnnnnnnnnnnnnnnnnnnnnnnnnnnnnnnnnnnnnnnnnnnnnnnnnnnnnnnnnnnnnnnnnnnnnnnnnnnnnnnnnnnnnnnnnnnnnnnnnnnnnnnnnnnnnnnnnnnnnnnnnnnnnnnnnnnnnnnnnnnnnnnnnnnnnnnnnnnnnnnnnnnnnnnnnnnnnnnnnnnnnnnnnnnnnnnnnnnnnnnnnnnnnnnnnnnnnnnnnnnnnnnnnnnnnnnnnnnnnnnnnnnnnnnnnnnnnnnnnnnnnnnnnnnnnnnnnnnnnnnnnnnnnnnnnnnnnnnnnnnnnnnnnnnnnnnnnnnnnnnnnnnnnnnnnnnnnnnnnnnnnnnnnnnnnnnnnnnnnnnnnnnnnnnnnnnnnnnnnnnnnnnnnnnnnnnnnnnnnnnnnnnnnnnnnnnnnnnnnnnnnggatgctggctggcaagtcaaagagatctgcctgtctccacctctcaaggctgggattaagaaagtgtgccactgtgcacagcttcccaatgtggggcctgctcctctgctcacagggcaagtgcttttcccagccatctcctgtgctgctaattctgtaatataaactcacaagcctgagcagattaccaaagagaacagttgggcttctgagacagagcctggtagggttggagagagggctcagtagttaagaagacagtttgattcccaggctgccttgggcatacccatggtacagagacatgtacagaggcaaaacacctatacacattaaaataaataatagtaggaataacacccccgcccccagtggcacatagaaagcaggttggggttgtgggaagtgttggagcctctttgcctggccagtcagtcactcctgcatctgtgggtgtgaagcttcagggactcagtctgtgagccgtgtgaaatggtggcagggtggtcttgggaagcaggaggctctgactcaggtgtggctggatgtgcctcatagcacatgaatggagatgtgtgcgtcatgcagtcttcctgcagccacaggccaggacagctgtctgcactcaccttttttccattttgtgtgtatgtgtgggtgtgacacgcacgtgcatatgtcctgtttgcatgtgtagggtgtatctttctgtgcacatgcatgcgtatgcgtgtgttcttgacagtgatgttgggaatctttcatcttactgaggcagggtctcatagtcaaaccgatagtcctgctggtgcgcttgctctgggatccctgtctcacagcctttatggctgtcatgctcagcctgtgtgaatttctgaggctctagcctgtgtgcgcagcaagctctttaaccattgagctgcctcctccatgcttgttttgttttttgagacaggtttttctgtatcccaggctggcctcagattcagtctgtagcataggctggctcctcatcctcctgcttcctggctcccaggtaccgggactcctacagttgggtgctacctcaactggctttttcattcttcttatgtttcccttaaatgaaattgtgtattactgaatgctaagcctgaattcactttaaatttttattatgtttatttaactattttgttctatgtatgtgagcaggtgacatggtttaagtgtggaggtcaggggaatttgtgggagtcagcgctccttcaatatatggatccagtgtcaggcttagcagcaatcatccttacccagtgagccctttagccagtctactgtgttctccctctctccctctctccctctccttttccctctccctctctcccttccccttccccccctccctccctcccctttcctcccctctccattcccccnnnnnnnnnnnnnnnnnnnnggtgggcttgccacataggtaggcaaccagtctacctatgcatgaggctactcaggcttccctgcttggctgagagtcctgtaaatcaaggttgactgactctcccagaggctccctcagctcattggcctgctagctctcttgctgacatatgtgctatgtccccgcacaggtcaggagcgcatggtgatagctgacgatctgccctacccgtttggcctgactcaatatagcgattacatctactggactgactggaacctgcatagcattgaacgggcggacaagaccagtgggcggaaccgcaccctcatccagggtcacctggacttcgtcatggacatcctggtgttccactcctcccgtcaggatggcctcaacgactgcgtgcacagcaatggccagtgtgggcagctgtgcctcgccatccccggaggccaccgctgtggctgtgcttcacactacacgctggaccccagcagccgcaactgcagccgtaagtgccttgattcccacttgctgcacgcaccaggccttagcccctgagccaccactgtggctgagattcttccagccaccagaatggctcctgagtctgtgttcttgacgctataagcctgtacaaccccgtgttactttcatggcgggggaagtgaaattcagaaggccagggaatgacttcccagtagccctctgaggacaggtgtgtcttgtcagcaggctccatggtgatatgatattggcagcgagccagatacagactggcctccagctagagctagacagtccctgaggcctctgccatcgggtcttgcgcatcacccatacgtagcacggctctgctgcctttccctgttgagcaggtgaggaccctgagatttgaaagggtgggaaatgtacctgaccctgagctggtctgcagtggccacagccagagtcacctccatttgtctgtctgtgcactacatgtgtgtagtgcccagagaagcaagaagccttggatgccctggaactggagctacagacagttggtagataccacataggtgctgggaatagaaccccaggtcctgtggaagagcagtcagtgttcttaactcctgagccacctctccattattattattattattattattattattattattattattattattattaattatttttgagatagagtcttactatgtagctggcctgcaacttgctatatagacaagactgccctcaaactcgtggagattcacctgccccctccttctccccctcccccctcctgagacaaggtttctctatgtagcccggctgtcctagaactcactttgtagaccaggctgccctcgaactcagaaatccgcctgcctctgcctcccgagtactgggattaaaggtgtgcgccaccatgccctgcttgtccccgcttttctgagtgctgtgtgtccaccatgctcagctgggctgttcttgaagcaggtaggggagcagaagcaagaatgcttaacttcctagtgtcttggaacagtggcttggatttcaaaccacccactgtaacacactgatcctggaggctgcctggtacacatctgagtatcatagttcctgaatctgggcagctggccttgggcctcaggacctgggctccctgccaggaaggagagcttgctttctaatctccccaaaagcagttttctcctgttctgctctctgtgggtacctgtattcacatccacactcccacactccccacctcttgcacacaacttaaaaaataataaaagcaaatcttaaaataatcccgggactggggtagagtgctgacctagcatgggcaaagcaaatgtagcatggcataaacagggtgtggtggtgcatgcctgtggccccagtacttgagagatagaggctcttagtgtttgaggaggatgaagagtgaagagagtttgagaccatccttgacgtcctggacaagttcaaggccactctaggctagaagataccctagattaaaaaataaaataaaataaagaaaaggggggaaaaggtgtgaatttattcagaacaatcatacacttttgtgatgatagcagaaatagcgcagaatccgtgccagctgacagttctgtgtccgctcttctctaagaggcccagtgtctgtaaccactctgggtgtcatatccctggccccagcctctcatctccctcttactgatgctttctgctcagtctgtttgtccagcttttcagcttgctgatgttctctgctaggtctgtctgtccatcagccttagctggctatgcttgccactcagtctgtttatccagtcccttagctttcacttgctaatgctctctgctcagtctgtctgtcctgctccagcgccctcagcttgctgatgctcggcgctcggtctgtttgtcccactccagcgccctccaccttcttgctgttcagccagaaatttgccatcagccggatgatccccgatgaccagctcagcccggaccttgtcctaccccttcatgggctgaggaacgtcaaagccatcaactatgacccgctggacaagttcatctactgggtggacgggcgccagaacatcaagagggccaaggacgacggtacccaggcaggtgctcctgagggcagggtgtgggagatgctctgcccagagcttgccctgctggcttccaggctgctccccttttctgggcagggctggtggcaaacaaggatttgggctccagttatgtaattataggtgtgatcctggccttggacttacgagaaactggctttcccagttgttggtaggggaagggggttgggtggtagtgggtcaggctttatggatcttttgtccaatgtggttttctgttgcttagaaacactacatgcttcctttattttataagatgcatgcaattaatctttgtgtgtgtctgtgtttatgtgtgtgtgtgggaatgagacagcagtgttgggtgttgttcctcaggagcaatccaccgggtttctccttgggacctgggactccctgatcagggtgggatgctggctggcaagtcaaagagatctgcctgtctccacctctcaagggctgggattaagaaagtgtgccactgtgcacagcttcccaatgtggggcctgctcctctgctcacagggcaagtgcttttcccagccatctcctgtgctgctaattctgtaatataaactcacaagcctgagcagattaccaaagagaacagttgggcttctgagacagagcctggtagggttggagagagggctcagtagttaagaagacagtttgattcccaggctgccttgggcatacccatggtacagagacatgtacagaggcaaaacacctatacacattaaaataaataatagtnnnnnnnnnnnnnnnnnnnntctgggctccttaggcactgtaggtatatggtatacaaacatacatatgaacaaaatacccaatcacataaagtaaatatttaaaggtcaggtgtagtgatccatgctttaatctgagtatttgggaggcagaggcaggtgaatctctgtgagtttcaggccagcctggtttacaaaggaattccaggacagccaaggctacacagagaggtcctgtctgtcttttattcattcattcattcattcattcattcattcattcatactacatacatatatacatacacaccttaaatgataagattgagacttctggccttcatatgtatgcacacttatgtagataaatacatccacataaatactgggcgggcatgggcacacacacacacacacacacacacacacacaatgagtgaggagagaaagcaccatgcttacagaggccagtgatcatggtgcagttagatggtatgatcctgaaccctaggcctgccctagtgcgagcagcctgcttatatggtatctgtcccagctcccagccctggagagtatagaaatgccccagactcgcatggccccttctttaaatatgcattctcctgagcacagtgggtctggcccttcacttggctgccactcatggagcctttatgctaaccacaggggccaaccgcctgaccctggaagatgccaacatcgtacagccagtaggtctgacagtgctgggcaggcacctctactggatcgaccgccagcagcagatgatcgagcgcgtggagaagaccactggggacaagcggactagggttcagggccgtgtcacccacctgacaggcatccatgccgtggaggaagtcagcctggaggagttctgtacgtgagaggggacagtgtttgtggtggggtctccctgggggaaggtgaatcagccctactggcatcagatgggctgctggtgcaagagcagtgtgcctgaggagctcatgggctcagcaccgaaggccagtgcatgtccagannnnnnnnnnnnnnnnnnnntgtttctgtctccctgtcttacccccactcccaaccccctctctatagctctggatgtcctgggacttgctatggacactagactggcctggaactcacagatatccccctgcctctgcctcttaagtgctgggattaaaggcatgcaccaccatgcctaattagcccagttttcaaatctaacagagttgagcttctcccggtctgtgactagtccaggaaggacctgcctcaggaagcctatcacaacagccacagaacccagtggcccctttcccaatgtatgctatgggacagctatgttaaagcagaacttactcccatgggctggttttcagatctctggaaatgtagattttttttttgttaaaaattaattaatacattaatttgtgtgtacgtgcatgcctctgtgtgtgtgtgtgtgtgtgtgtgcccgtgcatgcgtgactagacactagtttgatccctttaagctgaatgactgtgtttgttagttacttttctgttgctgtgataaaacaccctgatgaaaatcacttaaagaagaaaggatgtgtctcacagttcaaagttcaggctgttagagctcaagctaaggaggtagaagcagaaccaggcagctggtcacattgtgtccatagtcaagaagcagagagctaggcatggatgatggtcacattgtgtccatagtcaagaggcagagagctaggcatggatgatggtcacattgtgtccatagtcaagaggcagagagctaggcatggatgatggtcacattgtgtccatagtcaagaggcagagagctaggcatggatgatggtcacattgtgtccatagtcaagaggcagagagctaggcatggatgatggtcacattgtgtccatagtcaagaggcagagagctaggcctgggggcacacttttaatcccagtgcttgggaggcagaggcaggcggacctctgtgaatggttttagaccacccagaactactttgtgagatatgtctcaaaacaacagtgtatcagcagagagcagtgtatgctgtgctgtctgtctgtctgtctgtctctctctctcttttttattatttttttacatttctttattgaggtatgtgccattgcatgcatgcttggggcggggtcacaggacaccttgtgagagtgagttctctccttctaccatgtgggttccacagagcaaactcgggtcgtcagacttaccagagaccctttctgccttctttttatgcaaccagaatcccaggcaggaaatggcgctatccacagtaggctttcttgtctaggttaacccaatcaagatactctcccaccagtctgcccagaagccaggtgatctcccaggtaatagtagatgccatcagtttgacaatttagacaaannnnnnnnnnnnnnnnnnnngcatgcaccaccatgcctaattagcccagttttcaaatctaacaggagttgagcttctcccggtctgtgactagtccaggaaggacctgcctcaggaagcctatcacaacagccacagaacccagtggcccctttcccaatgtatgctatgggacagctatgttaaagcagaacttactcccatgggctggttttcagatctctggaaatgtagatttttttttgttaaaaattaattaatacattaatttgtgtgtacgtgcatgcctctctgtgtgtgtgtgtgtgtgtgtgtgtgtgtgtgtgcccgtgcatgcgtgactagacactagtttgatccctttaagctgaatgactgtgtttgttagttacttttctggtgctgagataaaacaccctgatgaaaatcacttaaagaagaaaggatgtgtctcacagttcaaagttcaggctgttagagctcaagctaaggaggtagaagcagaaccaggcagctggtcacattgtgtccatagtcaagaggcagagagctaggcctgggggcacacttctaatcccagtgcttgggaggcagaggcaggcggacctctgtgaatggttctagaccacccagaactactttgtgagatatgtctcaaaacaacagtgtatcagcagagagcagtgtatgctgtgttgtctgtctgtctgtctgtctgtctctctctctctctctcttttattatttttttacatttctttattgaggtatgtgccattgcatgcatgcttggggcggggtcacaggacaccttgtgagagtgagttctctccttctaccgtgtgggttccacagagcaaactcgggtcgtcagacttaccagagaccctctctgccttctttttatgcaaccagaatcccaggcaggaaatggcgctatccacagtaggctttcttgtctagattaacccaatcaagataatctcccaccagtttgcccagaagccaggtgatctcccaggtaatactagatgccatcagtttgacaatttagacaaaccaccacaaggtgtatatgataaaaatcctcactgacctgttaggttgtcaagtcatagctataggttcgactctccttttctttcttcatattcttcttcctgttcatcctcttcttcctttccctctttttcctcctctccttcctccccttcttcttctgttagtggtaggttcgactccccttcatagtcttcttcctgttcatcctcttcttcctttctctcttcttcctttccctctttttcctcctctccttcctccccttcttcttccgttagtggtaggttcgactccccttcatagtcttcttcctgttcatcctcttcctttttctcttcttcctcttcctttccatcttcttcctcctctccttcctccccttcttcctctgttagtggtgaagatagtggctggttcttcaactccacgctgggcaagtggttccaggctgtcacctcccagacagtcaccttgagtactatggatgactgtagcttttgtgtaagaaagcgccatgctacaaatcttaagtcctgtgactttcagaccctcccctccccttgtctgcctcagacactttcctgcaccacccagtccttcccacttctccttgcctgtcccagataccccttagctgcatttgcctacccatcactcgctgtacatccttgccttgctccaccctttgacccaagagcctcacacctgccctatgccccttgcctggctctgcagccctgggtcccctctccgtgcataagaagagaggtatccctctgctctccattcctactctcctggccactgaattaaaagaacaaggtttgaacatcgaaagccannnnnnnnnnnnnnnnnnnntcttttttattatttttttacatttctttattgaggtatgtgccattgcatgcatgcttggggcggggtcacaggacaccttgtgagagtgagttctctccttctaccatgtgggttccacagagcaaactctggtcgtcagacttaccatataccctctctgccttctttttatgcaaccagaatcccaggcaggaaatggcgctatccacagtaggctttcttgtctaggttaacccaatcaagatactctcccaccagtctgcccagaagccaggtgatctcccaggtaatactagatgccatcagtttgacaatttagacaaaccaccacaaggtgtatatgataaaaatcctcactgacctgttaggttatcaagtcatagctataggttcgactctccttttcttcatattcttcttcctgttcatcctcttcttcctttctctcttcttcctttccctctttttcctcctctccttcctccccttcttcttctgttagtggtaggttcgactccccttcatattcttcttcctgttcatcctcttcctttttctcttcttcctcttcctttccatcttcttcctcctctccttcctccccttcttcctctgttagtggtgaagatagtggctggttcttcaactccacgctgggcaagtggttccaggctgtcacctcccagacagtcaccttgagtactatggatgactgtagcttttgtgtaagaaagcgccatgctacaaatcttaagtcctgtgactttcagaccctcccctccccttgtctgcctcagacactttcctgcaccacccagtccttcccacttctccttgcctgtcccagataccccttagctgcatttgcctacccatcactcgctgtacatccttgccttgctccaccctttgacccaagagcctcacacctgccctatgccccttgcctggctctgcagcctgggtcccctctccgtgcataagaagagaggtatccctctgctctccattcctactctcctggccactgaattaaaagaacaaggtttgaacatcgaaagccaagagcctgagtcctaaacagtggaaatgaagggagagaggttgggcttcaggtctcatgtctatctagttgacagcctgccagtgtcctctggtggattccatcatgggacctagagtctggtgtcctgttggggctctttctagtttgttctgtgtattcgtaaatgggcatattactaagatctaagttgagggccatcgtgatggctcagtgggtaaaggtgtttgaaatcatgcctgatggatggcctggtttcaaatcctgggacccatgtggtgcaaggagagaaccagctctcaccatttgtcctctgaacttcacacggtgtcgtgaaaggtgtgcgtacacacatatgcacaaaaccaaccaaataaataaacttgtttttaaaagagccgggtctgcaagtaatgcctcacatgtgttgaaatcttaaccttgaggctgacttgcccttctgctctccctgggtgttcatggcgcatggcagtgtggtgctagcttggtttgcttctctctcacagccctccatgctgacctctcccagccaaagcctgagcccagacagacagccacacgacctcagcattgacatctacagccggacactgttctggacctgtgaggccaccaacactatcaatgtccaccggctggatggggatgccatgggagtggtgcttcgaggggaccgtgacaagccaagggccattgctgtcaatgctgagcgagggtaggtggccctagggagggacgggtgagggctgcaacctgctcagcccatgtattcattcgctggcccccgtgtacctgtagtgctggcctcgtgggggctagccagtgttcccaatgtggtacccaggacccccagctgcacaagctgaaggtgacgtctaggtggtggtttggggaccctggggatgtcaaccctgctgcatgggccttgtaccagtctgttcagcttgatctttgtggctgcaggattctgccccagacacaactcaaagcgcgtccttcctgggatcccccagcgcccttgtgtgctggtccttgtagtgccttgttagtgagagacccttggacaggtgcccacgaagctcaagaacaaagctgaacttgcatagaggctcaggcaggagctcactggcctttaagtcctgtggggtagacatgtaaagcaggtgttagattggcagggtgttgtctatagggttcccgataatgatcagagcctgatgtgccagtgttcaaatcctgactcctgcacttcgctaccgcagtgatggtgggcaggtgatgcggccttcagaggcttggtgtccctttctgtgatggtgacggtgatgtcagtctttcagcccatagatagctaagtagagcctagctgctggagggcgctgctcaggagctgtgtgaacaccctctgaggaggtgggaacaaatgttctgtggctacaatgttgatccatatactgtctcagacacttagtgtcttgccacttcaggttttccctctgaccagttgcttctctttgcttcatggccttctcttttcagcagttttcactggattcagggctaccctcacacacaaggattgtagctcaatcctaatattttccaagaccccatttccaaagaggctcataccctaagttccagggtggcatgaatttcagggacactattccccccaccatgaggtataacccggcagcctggaggacctgtgaggtcaggggctgggctgggcctgcggatgaggtgggagctcacagcgcccgcccacttcttccctgcatctcccatgtgctgtgcttccgcaggtacatgtactttaccaacatgcaggaccatgctgccaagatcgagcgagcctccctggatggcacagagcgggaggtcctcttcaccacaggcctcatccgtcccgtggcccttgtggtggacaatgctctgggcaagctcttctgggtggatgccgacctaaagcgaatcgaaagctgtgacctctctggtatgcaccctggatgtctccagccactgagtcctcagtctgcaactgttggggggtgaccctaccgtgcgctcccagccttccttactaccaataggggtagcagttaaaatcttgctcggcttgctgtgagcctggcattgtgctgtgagcctggcagctctgtattcatatgtaatccaaataccatgggggcctggctgtgagcccctggactacggatcctagtgccttttcttctagtaaaagctgtgtgattggggaggtggctcagttggtaaagagcttcctatgcaatagaaggatctgaattctgatccccagcacccttataaacagccaaggtctatggcccatgcctgcagtcccagccaaggactgtggcccatgcctgcagtcccaacagaggactgtggcacatgcctgcagtcccagctgaggactgtggcacatgactgcaatcccagtgttaggaaggcagagtctggaggatccctgaggctctctggccagccaatctagccaaatctgtgcactccattttcagtaagagatcctgtttcaaaaagtaaggtggagaaccagccagatgactcagtgggtaaaggcccttgccaccaagtctgaagacaggagtttgatccctaagacccacatggtggaagatgagaacttactcctctagcaagttgtcttctgcaagtgtgctgtggcatgaccctcctcccccatgaatagaagtaataaaaataaaaactaagggtgctggagagatggctcagtggttaagagcactggctcctcttgcagagggcctcagtttagttcccagtacccacatggcagctcacaaccatctgtaactccagttccaggggatccagtgcccttttctgggctccttaggcactgtaggtatatggtatacaaacatacatatgaacaaaatacccaatcacataaagtaaatatttaaaggtcaggtgtagtgatccatgctttaatctgagtatttgggaggcagaggcaggtgaatctctgtgagtttcaggccagcctggtttacaaaggaattccaggacagccaaggctacacagagaggtcctgtctgtcttttattcattcattcattcattcattcattcattcattcatacnnnnnnnnnnnnnnnnnnnnnnnnnnnnnnnnnnnnnnnnnnnnnnnnnnnnnnnnnnnnnnnnnnnnnnnnnnnnnnnnnnnnnnnnnnnnnnnnnnnnnnnnnnnnnnnnnnnnnnnnnnnnnnnnnnnnnnnnnnnnnnnnnnnnnnnnnnnnnnnnnnnnnnnnnnnnnnnnnnnnnnnnnnnnnnnnnnnnnnnnnnnnnnnnnnnnnnnnnnnnnnnnnnncagttagatggtatgatcctgaaccctaggcctgccctagtgcgagcagcctgcttatatggtatctgtcccagctcccagccctggagagtatagaaatgccccagactcgcatggccccttctttaaatatgcattctcctgagcacagtgggtctggcccttcacttggctgccactcatggagcctttatgctaaccacaggggccaaccgcctgaccctggaagatgccaacatcgtacagccagtaggtctgacagtgctgggcaggcacctctactggatcgaccgccagcagcagatgatcgagcgcgtggagaagaccactggggacaagcggactagggttcagggccgtgtcacccacctgacaggcatccatgccgtggaggaagtcagcctggaggagttctgtacgtgagaggggacagtgtttgtggtggggtctcctgggggaaggtgaatcagccctactggcatcagatgggctgctggtgcaagagcagtgtgcctgaggagctcatgggctcagcaccgaaggccagtgcatgtccagatgtctgcctcttcgatcagtttgtttgctgatatagagaagtacccaaacatgctttttaaaaaagttctgtctttctacctgcccacctacccacacttctaccaatatcattctgtccatccgtccatccatccatctctgtcacttgtctatatttatcatctatttgtcagttggcctttgagacatagtttctaggtagccctggaattcttttttggtttttcgagacagggtttctctgtgtagcgctggctgtcctggaatttactctgtagaccaggctggcctcgaactcagaaatccgcctgcctctgcctcccgagtgctgggattaaaggtgtgcgccaccactgcccggctagcctggaattcttgacagttctcatgagtgctggaattctctgagctgggggaggggaggcagtacacatcatggcagtgattgtatgatgaagaaggctacatgcttcactggcagaaacccaagcacaaaggagagaggtggaatcccactgtctcctgtaaagacacctccccacccccacccccatgacccaaaagctctccactaggctcctgctgttttgttttgttttgtttttgcagtcctcagagtgaatttaggtctctgcttgctggataagtactctacccttgagctacacctccagttaggtcccactaggtcccactccttaaagttctgctgcttctcagtagtgccccagtggcaagtacctctcctgggaagtgcaagtctctgagtttcaattaccaaaagaagaaaggaccttccatccgctccccgaggtgcaaagccatcggggagcatgtgtccaaatggacagcctttcttgccagctgctccgatgccctgggggtatactgtgcttttccagggttcagacctgtggctgcccctccatgctgccacagccttacagcagtctgactcctccctagccccacagggaccatcagctgtccagagcttccctcctggctaggcatgatgtctctgagtaccttccttcttcatgctggaatggtggttgggttgatcttgtgccggtggcacggctgctgtacaggtacagcgctgctgccagactcggtctttacatcagattccatgtcagtattgattgactgggctgggagctgggaccaaatgagatggtcttctataggaatctggcctttgccttctacacacgttgagctctgaggaggaaggtagaggctgacccaactccatcttgctgtgtccctgcagcagcccatccttgtgcccgagacaatggcggctgctcccacatctgtatcgccaagggtgatggaacaccgcgctgctcgtgccctgtccacctggtgctcctgcagaacctgctgacttgtggtggtgagtgagaccttgggactttgagtagggagccatatcactgccttgcatgcccgaaaactgtgtcgaatctccaaagcatgccatttctttacttatggcttctctctctctctctctctctctctctctctctcccacctttttttaaaaaaaaacactcatacatacatacacacacatctagtgctatggttttctcccaaaaaactgcttttcctgcatctcacagattttaatacgttgtatcttagtttttggatagttcagatgtgtgtgtgtgtgcatgcacgcgtgtgcgtctatgtgctgtgtaaactaggggttaatcgtggctgttattcctcactttgcttttttagacaaggtttctcactgggaattggagcttgccaatcaggctgtgctatctgtccggtgaccccaaagatcctcttgtttctgctgccccagaactggggttacgagcatgcgtcatcacacctggctttttacgttgtgtgctggggattgaactcaggtcctcacacttgtgtgacatgtactgatcccgttcccagtcgctgaaatatttagaaaaaatttgagagacaacttcttcagcccaagtgctatttagcagtgtgttgtgaagtgcaggttggctcagtggtgagtacacttgcctagaagtatttgatctctagatacttaggagtgtcccagctgtctctgttctgatttcctctttaattctgctgtggtctgagtgctacccttgtggcatctctgttctttacatacattgttatgtgctctacggcctcgtgtgtttgggactcagtagatgtttcagtggtcttgaggagactgggggttctgctatgtcaggtgtaatagtctagaaaagtttattagattcggttgattgctagtacagatcagccgccttttctctttcctgattgcttagtccattatcagttacggacagggttgttggatttacaacagatttaaacaaagatttttttttttttatattgtctgtgtaaatatttgcctacattcatgtctatgcagtttacattgtccacagaggccagaagaagggtagtacatccccttggaaccagagttacaagcagttatgagttgtcagatgggtgctgggaactgaactctggtcttctgcaagagcagccagagctctttagggtctccagtcccctaataacagatttctgcttctgacctttctcctaccccctccctatatccttttcccctggggctgcatggttgtgatggtggtgtgtcatccagaaacaggcaaggaagacctaggttcaaaccctggactctgacttctaagatgagtgcctttcagctggacacatgccttttgtgagccactgcttccccctgtagagactgagaccatctacctggcaggctggctttcctttaagtaacagagcacttgtggggaatggccataaaagtgacagtcttcaatgctacggtgattaagcgtgcctccttcggggcttcctctctattgtgtgctgggcagcctgggaagagttctcaccagcatcaggcttcatccttgctcgtgacttcccccatatactttggactttcactgagcaactgagcattgttctctaatggctagtcctgctcctgggagactggtctgatacttcaaaccttacagtttggccaagaacagagagggcatttgctgtctgtccattccctttcacatctagtagcttaaacagacttgtggtctgaagctgctgtctgtgtggctcccgtggatgcctgagcctcctgcctagagcggggactatggagtggcccccactgatccaggcctggctctccacttaggagcatgtgcttagcctaccgtgagatttggaagtccctccttttggtttgtttgtgttgttttgttttatttgtttggtctttgagacagtgtctcttgcagtccaggttggccttgggtttctttttttttttttttttttttttttaaagattttatttatttacttattatatgtaagtacactgtagctgtcttcagacactccagaagagggcgtcagatctcgttacggatggttgtgagccaccatgtggttgctgggatttgaacttccgaccttcggaagagcagtcgggtgctcttacccactgagccatctcaccagcccctggccttgggtttctgatgtagttaaaatcaaccttgaactgcagatccttttccatttcccaaatgctgtgactacagggcatctgcctttatcctcagtttgaggtctctgctcacagcctgtgagatgtgtattttcaatgcagacactttgcaatcttccatggctacttgtctggtcacaggatgaagggcttgcttaggcccttagatggaagccctgtgacacatcaggcaagtgggaaggcaggccagggcctaaagtgcttcagtgcttcaacaatacagccccccactccctctgtgtggcttggcctagccacacacctgttcctgccccacaggcctgtcactcatgcagtggaacctgggtgtacagcggaggagatggaggctttgagatgcttaggaacatctcgggttttccatcctgaatatggtgaatgtcatgattgctacttaattcaaagttcacagtcagtccatgttccttacctaagaaaagagacatggaggggctcaatgggtaagaacacttaattgcaaacatgaagacctgaattcaaacctccattagccacatcacaggcaggtgtggctcttggagcacctgtaaccctagtgctatggggagaaacagggcgtcactgaggcttgctgactgccggcaagctccaggttcagggagaggccctttttcaaagcattaaagtggaaagtgatggagaaagatgctctccatgtctgcataggtgtatgtacctccacatacatgtgcatatacaacacacacacacacacacacacacacacacagagagagagagagagagagagagagagagagagagagagagaggagaaaataagagagatattgaggctgtagcttggttggtagagcacatgcacaaggccctgggttcagtccttcgcactgtgttaaccaggaatggtggtacaaacatgtaatccctttcctaaggaggtggaagcaggaggatcagaagctcaagctcatccagggccctgggttcagtccttcgcactgtgttaaccaggaatggtggtacaaacctgtaatccctttcctaaggaggtggaagcaggaggatcagaagctcaagctcatccagggaagtttgaaagcaactttttcatccctgcctttatctgtgctggggctgaaggtatcacatgagcaggagacagtccccagggcactgctgacacaaagtcagtggaagcgcagcgatgcctttgcgtggctcgctgggtggagcctgcatgactgtggtctccttccctcccctagagcctcctacctgctcccctgatcagtttgcatgtaccactggtgagatcgactgcatccccggagcctggcgctgtgacggcttccctgagtgtgctgaccagagtgatgaagaaggctgcccagtgtgctccgcctctcagttcccctgcgctcgaggccagtgtgtggacctgcggttacgctgcgacggtgaggccgactgccaggatcgctctgatgaagctaactgcgatggtgaggccctaccctggctgccatctccctcccaggtcccattaaagccatttgtccttccttcctatacatcaaacacggggctccattttgccttccacaggtaagggtgctagaaaacagctaaattggcaggccgtcttggtgggaacaaatgaagtaagttttaggcacagcctgaaggaatgctcctgcatgaccccatctattcttcgggcagttgacttaaagacaggctgagactcacatttccacatttggtagtgacttctgcagaaatgtaagataaatccattagtcagttgctttcagggctcacacccggtacagtgtcatcttcaaaggcagtgccacactcactgcattgtgccatctgtgggataatgctggccacctgggaccactctgactgaccacgtgtgtcccgtcgtcctgtccccgtccccgttccccgtccccgtccccgtccccccgcttttgagatagggctttatatagcctgggctaaccttgagtttgctatgtatctatagtcttgaacttattctttttctacttcctacatgctaggattataggtatatattatcagtgtgatatgtagaggatcaaacccaaggctcctaaatgctatgcaagcactctgtgcttatcaacctagctacattcttaccctccctccctccctccctctctctctctctctttctgttttttggatttttttccccctgagacaagggtttctccatatagccctggctgtcctgaaacaatagaccaggctagccttgaattctgtctgcctctgcctctgcctcctgagtgctgagattaatggtgcatcaccaccacctggccctcacccttatcttgagattgtgtgtgactctgtgtgtgtgactgtgtatgtgtgtgtgtgtgtgtaagactctgtgtgtgtgtgactctgtgtatgtgtgattctgtatgtgtgtgtgactctgtgtgtgtgattctgtgtgtgtgtgtggtgtgtgactgtgtgtatgtgtgtgtgactctgtgtgtgtgattctgtgtgtgtgtgtgtgtgtgactctgtgtgtgtgtatgtgactctgtgtgtatgtgtgtgtgattctgtgtgtgtggctctgtgactctgtgtgtatgtgactgtgtgtgtgtgtgtgactctgtgtgtgtgtgtgtctctgtgtgtgtgtgtgactctgtgtgtttgtgtgtgtatgtgactctgtgtgtatgtgtgtgtgattctgtgtgtgtggctctgtgattctgtgtgtgtgtgtgactctgtgtgtctgtgtgtgtgtgtgtgtgactctgtgtgtatggtgtgtgactctgtgtgcgtgtgactctatgtgtgtgtgtgtgactgtgtgtgtgtgacgctctgtgtgtgtaactctgtgtgtgtctgtgactctgtgtgnnnnnnnnnnnnnnnnnnnnnnnnnnnnnnnnnnnnnnnnnnnnnnnnnnnnnnnnnnnnnnnnnnnnnnnnnnnnnnnnnnnnnnnnnnnnnnnnnnnnnnnnnnnnnnnnnnnnnnnnnnnnnnnnnnnnnnnnnnnnnnnnnnnnnnnnnnnnnnnnnnnnnnnnnnnnnnnnnnnnnnnnnnnnnnnnnnnnnnnnnnnnnnnnnnnnnnnnnnnnnnnnnnnnnnnnnnnnnnnnnnnnnnnnnnnnnnnnnnnnnnnnnnnnnnnnnnnnnnncacacatgcacacatgcagttatactcttttttttttaaagatttatttatttagtatatgtaagtacactgtagttgtcttcagacaccccagaagagggcgtcagatctcattatggatggttgtgagccaccatgtggttgttgggatttgaactctggaccttcagaagagcagtctggtgctcttacccactgagccatctcaccagcctgcacttatactctcaagacatctttttttaaagacttgtttattatatataagcacactgtagctgtcttcagacactccagaagagggcatctgatctcattacagatggttgtgagccaccatgtggtcgctgggatttgaactcaggacctttggtagagctgtcaatgctcttaactgctgaggcatctttccagcccccaaggcatctttatccactaagtcagtggttctcaaccttcctggtgctgtgacccttaatacagttcctcatgttgtggtgactccaaaccataacatgtattttgttgctagtacataactgtaattttgttgctgttatgaatcatctgatatgcaagatgccctacgtgtgaccctgccagagggtcttttgacaccctctcccccaagaggctgtgagacccacagtttgagaactgccgcattaagccatctcgctggccagcctttaattaacattttttaaaatttccattttatgtgtatgggtgttttgcctgaatgtgtgtatgtgtagcacgtgcatgcctggtgctggcagaggccagaaaagggtgttggattgcctggagcctgagttacagatgcttgtaaggcgccatgtgggtgctgggaactgagcccaggtcctctggaagagtagcccttgtctcctaagtgctgacatgtctccagccctccctgaacctctcttagcgtttgctgtgtgtgtcgctctagtgcctgatccacactgaactctgtcacaggccacatgttttcagcaccatagacccaggctggcactgagctgctcctgtggcattcttgctgtctctgcccgaagctgctgggttatgctttcaatgactcagatgctggctgccactttcctgcatccccattcagcatgaccccacgttctgcaggggacaaggcctggagtggccttggcaggtttctctgtgaagccatgatgattgctttgcagctcaccagtgctctgagggatctggtggaagccacgataacggcacatgtgcccaaaccagtttgctgccaatgtctgtaaataaaggtacattgtctgtgccaggcccagtggttcctgtacatgtgggccaccctcaggctagacgagagctgggtggttggttacagagccagcaatgtctgcttctggtctcagagtatcatatgtgatcagtttagaaatcctccctcatcccactcacctgctcaccctcttcaccactgacagcaggtgctggccctccacttctaggaaggacagagtgcccttgtctcctgttcccaggtcagcacctggagcatgtcaggagagggtccagatggatggttgtgagaggatgttaagtccccagatgcttcctcagagggccgcagtctgcagatttgtttgcccactctctcccaggtgttagaggagataaccttggtctctacaaatgcagcacctacttccatggagttctgggctccactgacccagcctgcactgaggaaatggcgttgttgccgactccaccttcctggaaatcctgcttgatcctggagctgaggctactgctctgtgctgtctctgactcaggctgcatgcctcctgggcacaggctgggcatcaaggtctctgtgccctttggcattgaacagagcttcagggatcattttaaggagactggattttccatgatcttttctagctgggtcctagaaagtattcctgctactgggtctgtatttggaatcagaccttttcggttggagccaggcaaaactgctgctctctggctcctctgagcaccgcccctttctccccacagctgtctgtctgcccaatcagttccggtgcaccagcggccagtgtgtcctcatcaagcaacagtgtgactccttccccgactgtgctgatgggtctgatgagctcatgtgtggtgagtggtttcaggcagctccttgagggggcagggtctggtgtggagattgggtggagctgtggaacctgaggcacctaggaggctcatttagtgagtggccttctttagtttctttctgttggtggaatgaaatgccctgacacaagcaacgtggggagaaggggtttatttgggttcacttctaggttacagtccatcattgtggggagatccaggcagaaactggaagctgctggtcacatccatagttggggggagggagggacggagggagggagggagggagggatgcatgcatgcctactcataagctctctttctcttctcttataaatttagggccaaaactcaggttcccatgtacccacaggccaacctgatctagactgtctaacaagtgattctaaattgtgtcaagttgacacaaaccatcagagagaggcaacagctagaaagcagagactgagctgtggagtttcctaatggggtggagtgctggcaaagccagacatagagaggttggcctgcttgggagtctgcctccccgtgagctgttggcctcagacctgagtagcagccacacttttgctactgggaccctccttggtacaatctgctctatagcagaggagacctgagattgcacgtgcctcaagaaaaatgaagtgtatatattgtacatacatgcacacttataaatatgccgtaaatatcccttggataacattgatacccaggagtgcaggtgttactgtggatgatgggtggttggggcagtcagagaaagcttgctagaggctgtcagtggagacaggaaggaattggaattcagagagatgtaatgctttgctgcctgtggctactctatccactgcatggggaaccagggcttagccctcagctctggagaggagggcatatgggagagggcagtttccccacggactcagacaccatctcaggttagacactttgggctcagatggaggagttagggttgctgatgtcctctgtcttttgctaggcaggggcctcatctggtgaggtcagcacatgggctgccataggcctggtgtgcttgctgacactccccacactcaggccctgtcctctgaggcagaaggtttttttttccaactccttcaggttgtggaaggaatggagctgatgtctgtgggactgttggttcccaaagtgaacatacttttgccagctgaatcagggatgtgtccttctcgttctggtggccttgatataagggctctgcccccaatagacccctgtagactggcacccagctgctcacacctaattccagaccacccatcccagctctcttccaccatgacacaggctagggaatacttgttgccaacctccgcccagtgcactgtgggcaatgccatgagagcatggctcagggtcactggaaaggaagcagggttggccaggcagagaagacaggtgagggagccccctggcaggcccaggaacagcggcagtggtcccagagtgagccaaacccatgtccccagcttacctgctactcctgcagctgctggggtttgggcaaaggtagcccttctagggtcacagcatgtttcccgtgggaggtcctccccctagggattaatgtgagcgatctatccctacccaacagaaatcaacaagccaccctctgatgacatcccagcccacagcagtgccattgggcccgtcattggtatcatcctctccctcttcgtcatgggcggggtctactttgtctgccagcgtgtgatgtgccagcgctacacaggggccagtgggccctttccccacgagtatgttggtggagcccctcatgtgcctctcaacttcatagccccaggtggctcacagcacggtcccttcccaggtgaggagcctgaagcatttactctgtgatggagggggtttggttgagttgcctgggaagaacctggagggtcacccacagaaacacggtcttccaggggtgacactttttgcttcaaaccctgtcagcagcagggtgtgcccatttccatgcctcttgagggtgaaagtagctgtttcctctgaggccacctgaagactgcccaagcctctgcagctttgtaggggtagaaggcagaacttgtcaggggctgcgacagcatcactctcccaggattcttaggatgcctggcctctgtttgtgtggtatgttctccactcagccttcctgagaatttctctgagtctgagtgctttctagagacttggatagcttgccctggtatcgccagaaacccagatctgcaggaggtgatacatgactgcccgagtaggagttttgtgggtgttgggaccgaggctgggcatttgctcattctgacatggcctgtccattcccacaggcatcccgtgcagcaagtccgtgatgagctccatgagcctggtgggggggcgcggcagtgtgcccctctatgaccggaatcacgtcactggggcctcatccagcagctcgtccagcacaaaggccacactatatccgccggtgagtgaagcaggcaggcgaatggatggcagtgggagactctcccctcagtgctggctccagggacttcctgggtggaaggctttctaagctagtgattcttccagcaccccagagaagggtgctgagtgatgccccccacttctcaccccagagaagggtgctgagtgatgccccccacttctcactcgtgctattgttttctgtgtaggagagggtgacctgtggctattgagatggtcgacaaaacacagatacagaaggggatgtggctcagttcttagggtgcatgttccaaggtctgtgttctatcccctacacaggatagtgggtatagagatggaggtagaaggatgtggaatccaaggtcatccttgtttacacaaggagctggaggacagcctgagagacatgtctttatatctcaaaacccaaaataacaacctggtgtcagggcgcacacacttttaattttagcccttgagaggcagaggcaggaggatttctatgagttcaaggctagtatagactacataacaagttctaggacagctaaggccgaaggggctcaaaaatatagatagtgccagacatcaacatgctggcttttccctgtgcacacagacctgtggtcatgtcatttatatatcagatgcaggaagaagtttgtgactaataataagcctgaataattctaacaataccctgcagtaggttatatgaatgtaacagtgaagatagggctaatgggatggtttatcagggcaaggggcttgacaacaactgccagcctgagttcagttcctgggagccacgcgctagaaggaggaaaccagttctctccggctgccctccaccctccccacacactatggcatgtgcgctggcccccaaccaacacattgatgtaatttttttaagaaagagtcaagacagatattagcattttcagacctaggtaacacaccctagagggcaaagccacagtgggggctacaatagtgggtgtccttggagacctcagtgcttgactgcatgttctgtaggcaccttgcctcgaccaggccttgcagcttacacaaaggcaaggacagccccttgagcttcttccaggggctccctagggagcctccccttgccccttggggtagcccttgtttgtgtgctgtcatttccttatcactcctccccttatcctgggtggatgtggctgaggacagtgttatctgaggtgacaggacaggagctgagtcttctgaaagttccagcgacatctggagtttagaacacctcactgtttttgtagtcacatagctatctcggctggcagagcagctcagaactacctctcgtaagttaaagccctgcactcagtgcactgagcatagtcacaggtctgcagacctgcacatcgaagtgggatccccaggaaaccagagtcagctcttcagaagcagctagtgtagtgtgctcagagtgcagtattcaaagagcacggaatacagatgctaactaagtcaaatgggactctaggagctatgtatacctgtgagttctctgggcattattattgtattttgagataggatctgttccaccatggccttgaactcatctttctgccacagtctccctaatacctgagattacaagtatgcaccgccactcctggctttcatgggagactctttatgtaagcttggagtcagaatttatgggtttataaggtatgaacttaattttctctaagaaggaagtggcttttcttattttttatttttaaacttcagttttaggtcattgtgaatttatgctcaaccccaggggataatatctcccaccccaggttctcacatggtaaaaagccacatacatgcagtctagtagcataagcaggacctagacaggatcctgcaaatgtggattttaacagcttacacacgtgcaggttggcactctagctcagtggtagagcgcttgcctctcatgactctagctccagattcagtccctagtaccacacatattgagaatagcatattgaggctagttgccaggatagtttacctgagcactgtggctcatgcctctactcccagcacttgagtggctgactctgaggattgccattcgtatgagccagcctgggataaatggttagagcctgttttaagaataaaatttaaggggctggtgagatggctcagtgggtaagagcatctgactgctcttccgaaggtcaggagttcaaatcccagcaaccacatggtggctcacaaccatccgtaacgagatctgactccctcttctggagtgtctgaggacagctacagtgtacttacaataaataaataaatcttaaaaaaaaaaaaaaaaaagaataaaatttaagctgggtgtggtgatgcacttgagaggtagaggcaggcgaatttctgagttcgaggccagcctggtctacagagtgagttccaggacaaccaggactatacagagaaaccctgtctcggaaaaataaataaataagtaaactaaacataaaataaaatttagcaaatctgtgtgcaccttgggaggctgagttcagtgccaatctgttctgcataatgatttccaggctagcctattttacacagtgagttggagtttagcttggtttacatagtgaatacccggccaaggcagggctacatggtgagacattgcctcagataaagaaacaaacacacagacagagaagtaaataggaccaagtgaagtaaagcagttgctcctgaagagccttctcagagcctggcatttgatggtagcaatgcttatccagcccctgtgctcagacattacatgttagcgcatccctaggaagtgtgtgtggtgaccacagcctggcttattcctcagtgggtgtagatgagatgcctgttttttccttgtcacaggtggggtcactgggagctgtcccaatcttagtacctcaaccttggtacctatctgggtgtcttggtttgtcattttgacctcttttgctagaggggacagttccccttcatgccagcagagggccacacttgcaagactgctgctgtcaaaacacaactagtctagcgtaggattaagcacttgggaggcagaggcaggcggatttctgagttcgaggccagcctggtctacagagtgagttccaggacagccaggactacacagagaaaccctgtctcgaaaaaaccaaaaaaataaaaaattaaaattaaaatacgtgtcacagccaggcggtggtggtacacgcctttaatcccagcacttgggaggcagaggcagggagatttctgagttcgaggccagcctggtctacaaagtgagttccaggacagccagggctatacagagaaaccctgtcttgaaaaaaaaacaaaacaacaacaacaacaaaatacgtgtcactttgaggctagcctggtctacagagtgagttccaggatagccaggactgcacagagaaactctgtctcggaaaacaaaacaaaacaaaacgtgtcactgtgaggaaatacccaacacaaacaatttaaagcgggatgggggggtaggggggagtggtttattttggctcatgggttcagggattcaaaggtttcagcctagagttttttgaaccaaacaacatggtggtaggagacggggtggagggcagaaccgcttcatgagttcagactggagagaaaggggcacagaaaggagctgaggctaggtcttcctcaggaacctacttccaagtaggctctgtcctcctttttgccacttcaaatgctttcagaccatgtttcatctaccattgatccgttgactaggtcctggcactcaggatctgatcagagacatacttagaggggtctgtcaccaagcccccagcaaagcacatctcacagtccagtttgttgtcttcccatcacagtcagtggtgagtggcaatgtgcacagcttcttgaaaaaggggtgagccaccacctctacctccttctccaacctctgtattggttaaagctccagcagggacttggggcatcttgagtaggagccaggtcacagggaatggcaggagatacaggagtgaaagtcaagtgcagccagtgggaggtatctgagggaagcagagagagaggcacacagcctctgcagagagacctactgctgctgggctcagggctaatgggagtgctcttgctgacactgccccctactggccagcacagtaatgctgagagggccgaggacatctggttgaaagcactttggtctccatgcctctgatccagcacctttggggaagatggctgatgccacccctctgcttcctaagtttcactagctctggaagggttctggggaccacaggcagagaatagagctccagaccccaggctggcaagctgagtaaatgattcagccaggagacgcttggagtaacccgtctccctccctctcctcagatcctgaacccacccccgtccccggccacagacccctctctctacaacgtggacgtgttttattcttcaggcatcccggccaccgctagaccatacaggtaggagcttgtcctcgccttccctactagtgagaagggccttgtctccgccttcctccatgtgtgtcccatgggctctgtctatgctgtttgcctctccttgctgggtttgtggggtgtggctgagtgtgagctcagagctggttttatacaagtgaatacatacataatgggcttctccattgcttgagacacctggagcacggccggccttgaaggaatctagaaaaggattcgctccccctccctccagtgctgtctcactgcatggaaacgagtgcttaggctctgctgtgtctcagctcagccatggccctggtcaaaacctgactaatgtaacctccattacgatgatttttcaattgtgtgtgtgtgcctgagaagaggccagaggcattccctggagctggagttacacacaattgtgagctacctgatgtgagttttgggaatcaaattctggtcctttgtaagaactatacatgtttctaaccactgagccatttctccagctaaagggtgatttttgctcctttgttaagacagtggcctatctgagctggaaaccccaaaagcgctcagccagactccaacccacaagttacctatattggggttctcagaccggttctcctgagtgagagtggtgctgtgagcattcctaatactggggtgatgcaaatagcttactctttttcataagaccccaatggtatgccatcaaaaattcacaccagagaaccagtaagtctattggtcggtttgtcttagaggggtgcaggggcccctgctctgtgtcaaaagtctttatccaccaccacagtatgcctttaggaaatctttctttttttttttttggtttttcgagacagggtttctctttatagctcctctggctgtctgtcttggaactcactttgtagaccaggctggcctcgaactcagaaatccgcctgcctctgcctcccgagtgctgggattaaaggcgtgcgccaccacacccggctcaaggagcagccttgtacacaggtggctaggcacacatgtgaacttcttctgtgttccttctaggccctacgtcattcgaggtatggcacccccaacaacaccgtgcagcacagatgtgtgtgacagtgactacagcatcagtcgctggaagagcagcaaatactacctggacttgaattcggactcagacccctacccccccccgcccaccccccacagccagtacctatctgcagaggacagctgcccaccctcaccaggcactgagaggagttactgccacctcttcccgcccccaccgtccccctgcacggactcgtcctgacctcggccgtccacccggccctgctgcctccctgtaaatatttttaaatatgaacaaaggaaaaatatattttatgatttaaaaaataaatataattgggatttttaacaagtgagaaatgtgagcggtgaaggggtgggcagggctgggaaaactttgtacagtggagaaaatatttataaacttaatttttta

SEQ ID NO: 22 - DNA, 4818 bp, Mus musculus
ccctccgccgccgccgccgccgctgctgctgctggtgctgtactgcagcttggtccccgccgcggcctcaccgctcctgttgtttgccaaccgccgggatgtgcggctagtggatgccggcggagtgaagctggagtccaccattgtggccagtggcctggaggatgcagctgctgtagacttccagttctccaagggtgctgtgtactggacagatgtgagcgaggaggccatcaaacagacctacctgaaccagactggagctgctgcacagaacattgtcatctcgggcctcgtgtcacctgatggcctggcctgtgactgggttggcaagaagctgtactggacggactccgagaccaaccgcattgaggttgccaacctcaatgggacgtcccgtaaggttctcttctggcaggacctggaccagccaagggccattgccctggatcctgcacatgggtacatgtactggactgactggggggaagcaccccggatcgagcgggcagggatggatggcagtacccggaagatcattgtagactccgacatttactggcccaatgggctgaccatcgacctggaggaacagaagctgtactgggccgatgccaagctcagcttcatccaccgtgccaacctggacggctccttccggcagaaggtggtggagggcagcctcactcacccttttgccctgacactctctggggacacactctactggacagactggcagacccgctccatccacgcctgcaacaagtggacaggggagcagaggaaggagatccttagtgctctgtactcacccatggacatccaagtgctgagccaggacgcggcagcctcccttccacacaccatgcgaggaggacaacggtggctgttcccacctgtgcctgctgtccccgagggagcctttctactcctgtgcctgccccactggtgtgcagttgcaggacaatggcaagacgtgcaagacaggggctgaggaagtgctgctgctggctcggaggacagacctgaggaggatctctctggacacccctgacttcacagacatagtgctgcaggtgggcgacatccggcatgccattgccattgactacgatcccctggagggctacgtgtactggaccgatgatgaggtgcgggctatccgcagggcgtacctagatggctcaggtgcgcagacacttgtgaacactgagatcaatgaccccgatggcattgctgtggactgggtcgcccggaacctctactggacagatacaggcactgacagaattgaggtgactcgcctcaacggcacctcccgaaagatcctggtatctgaggacctggacgaaccgcgagccattgtgttgcaccctgtgatgggcctcatgtactggacagactggggggagaaccccaaaatcgaatgcgccaacctagatgggagagatcggcatgtcctggtgaacacctcccttgggtggcccaatggactggccctggacctgcaggagggcaagctgtactggggggatgccaaaactgataaaatcgaggtgatcaacatagacgggacaaagcggaagaccctgcttgaggacaagctcccacacatttttgggttcacactgctgggggacttcatctactggaccgactggcagagacgcagtattgaaagggtccacaaggtcaaggccagccgggatgtcatcattgatcaactccccgacctgatgggactcaaagccgtgaatgtggccaaggttgtcggaaccaacccatgtgcggatggaaatggagggtgcagccatctgtgcttcttcaccccacgtgccaccaagtgtggctgccccattggcctggagctgttgagtgacatgaagacctgcataatccccgaggccttcctggtattcaccagcagagccaccatccacaggatctccctggagactaacaacaacgatgtggctatcccactcacgggtgtcaaagaggcctctgcactggactttgatgtgtccaacaatcacatctactggactgatgttagcctcaagacgatcagccgagccttcatgaatgggagctcagtggagcacgtgattgagtttggcctcgactaccctgaaggaatggctgtggactggatgggcaagaacctctattgggcggacacagggaccaacaggattgaggtggcccggctggatgggcagttccggcaggtgcttgtgtggagagaccttgacaaccccaggtctctggctctggatcctactaaaggctacatctactggactgagtggggtggcaagccaaggattgtgcgggccttcatggatgggaccaattgtatgacactggtagacaaggtgggccgggccaacgacctcaccattgattatgccgaccagcgactgtactggactgacctggacaccaacatgattgagtcttccaacatgctgggtcaggagcgcatggtgatagctgacgatctgccctacccgtttggcctgactcaatatagcgattacatctactggactgactggaacctgcatagcattgaacgggcggacaagaccagtgggcggaaccgcaccctcatccagggtcacctggacttcgtcatggacatcctggtgttccactcctcccgtcaggatggcctcaacgactgcgtgcacagcaatggccagtgtgggcagctgtgcctcgccatccccggaggccaccgctgtggctgtgcttcacactacacgctggaccccagcagccgcaactgcagccccctccatgctgacctctcccagccaaagcctgagcccagacagacagccacacgacctcagcattgacatctacagccggacactgttctggacctgtgaggccaccaacactatcaatgtccaccggctggatggggatgccatgggagtggtgcttcgaggggaccgtgacaagccaagggccattgctgtcaatgctgagcgagggtacatgtactttaccaacatgcaggaccatgctgccaagatcgagcgagcctccctggatggcacagagcgggaggtcctcttcaccacaggcctcatccgtcccgtggcccttgtggtggacaatgctctgggcaagctcttctgggtggatgccgacctaaagcgaatcgaaagctgtgacctctctggggccaaccgcctgaccctggaagatgccaacatcgtacagccagtaggtctgacagtgctgggcaggcacctctactggatcgaccgccagcagcagatgatcgagcgcgtggagaagaccactggggacaagcggactagggttcagggccgtgtcacccacctgacaggcatccatgccgtggaggaagtcagcctggaggagttctcagcccatccttgtgcccgagacaatggcggctgctcccacatctgtatcgccaagggtgatggaacaccgcgctgctcgtgccctgtccacctggtgctcctgcagaacctgctgacttgtggtgagcctcctacctgctcccctgatcagtttgcatgtaccactggtgagatcgactgcatccccggagcctggcgctgtgacggcttccctgagtgtgctgaccagagtgatgaagaaggctgcccagtgtgctccgcctctcagttcccctgcgctcgaggccagtgtgtggacctgcggttacgctgcgacggtgaggccgactgccaggatcgctctgatgaagctaactgcgatgctgtctgtctgcccaatcagttccggtgcaccagcggccagtgtgtcctcatcaagcaacagtgtgactccttccccgactgtgctgatgggtctgatgagctcatgtgtgaaatcaacaagccaccctctgatgacatcccagcccacagcagtgccattgggcccgtcattggtatcatcctctccctcttcgtcatgggcggggtctactttgtctgccagcgtgtgatgtgccagcgctacacaggggccagtgggccctttccccacgagtatgttggtggagcccctcatgtgcctctcaacttcatagccccaggtggctcacagcacggtcccttcccaggcatcccgtgcagcaagtccgtgatgagctccatgagcctggtgggggggcgcggcagtgtgcccctctatgaccggaatcacgtcactggggcctcatccagcagctcgtccagcacaaaggccacactatatccgccgatcctgaacccacccccgtccccggccacagacccctctctctacaacgtggacgtgttttattcttcaggcatcccggccaccgctagaccatacaggccctacgtcattcgaggtatggcacccccaacaacaccgtgcagcacagatgtgtgtgacagtgactacagcatcagtcgctggaagagcagcaaatactacctggacttgaattcggactcagacccctacccccccccgcccaccccccacagccagtacctatctgcagaggacagctgcccaccctcaccaggcactgagaggagttactgccacctcttcccgcccccaccgtccccctgcacggactcgtcctgacctcggccgtccacccggccctgctgcctccctgtaaatatttttaaatatgaacaaaggaaaaatatattttatgatttaaaaaataaatataattgggatttttaacaagtgagaaatgtgagcggtgaaggggtgggcagggctgggaaaactttgtacagtggagaaaatatttataaacttaatttttta

SEQ ID NO: 23 - protein, 670 aa, Mus musculus
RQPPFHTPCEEDNGGCSHLCLLSPREPFYSCACPTGVQLQDNGKTCKTGAEEVLLLARRTDLRRISLDTPDFTDIVLQVGDIRHAIAIDYDPLEGYVYWTDDEVRAIRRAYLDGSGAQTLVNTEINDPDGIAVDWVARNLYWTDTGTDRIEVTRLNGTSRKILVSEDLDEPRAIVLHPVMGLMYWTDWGENPKIECANLDGRDRHVLVNTSLGWPNGLALDLQEGKLYWGDAKTDKIEVINIDGTKRKTLLEDKLPHIFGFTLLGDFIYWTDWQRRSIERVHKVKASRDVIIDQLPDLMGLKAVNVAKVVGTNPCADGNGGCSHLCFFTPRATKCGCPIGLELLSDMKTCIIPEAFLVFTSRATIHRISLETNNNDVAIPLTGVKEASALDFDVSNNHIYWTDVSLKTISRAFMNGSSVEHVIEFGLDYPEGMAVDWMGKNLYWADTGTNRIEVARLDGQFRQVLVWRDLDNPRSLALDPTKGYIYWTEWGGKPRIVRAFMDGTNCMTLVDKVGRANDLTIDYADQRLYWTDLDTNMIESSNMLGQERMVIADDLPYPFGLTQYSDYIYWTDWNLHSIERADKTSGRNRTLIQGHLDFVMDILVFHSSRQDQDCVHSNGQCGQLCLAIPGGHRCGCASHYTLDPSSRNCSPLHADLSQPKPEPRQTAWQH

SEQ ID NO: 24 - DNA, 5018 bp, Mus musculus
ccctccgccgccgccgccgccgctgctgctgctggtgctgtactgcagcttggtccccgccgcggcctcaccgctcctgttgtttgccaaccgccgggatgtgcggctagtggatgccggcggagtgaagctggagtccaccattgtggccagtggcctggaggatgcagctgctgtagacttccagttctccaagggtgctgtgtactggacagatgtgagcgaggaggccatcaaacagacctacctgaaccagactggagctgctgcacagaacattgtcatctcgggcctcgtgtcacctgatggcctggcctgtgactgggttggcaagaagctgtactggacggactccgagaccaaccgcattgaggttgccaacctcaatgggacgtcccgtaaggttctcttctggcaggacctggaccagccaagggccattgccctggatcctgcacatgggtacatgtactggactgactggggggaagcaccccggatcgagcgggcagggatggatggcagtacccggaagatcattgtagactccgacatttactggcccaatgggctgaccatcgacctggaggaacagaagctgtactgggccgatgccaagctcagcttcatccaccgtgccaacctggacggctccttccggcagaaggtggtggagggcagcctcactcacccttttgccctgacactctctggggacacactctactggacagactggcagacccgctccatccacgcctgcaacaagtggacaggggagcagaggaaggagatccttagtgctctgtactcacccatggacatccaagtgctgagccaggacgcggcagcctcccttccacacaccatgcgaggaggacaacggtggctgttcccacctgtgcctgctgtccccgagggagcctttctactcctgtgcctgccccactggtgtgcagttgcaggacaatggcaagacgtgcaagacaggggctgaggaagtgctgctgctggctcggaggacagacctgaggaggatctctctggacacccctgacttcacagacatagtgctgcaggtgggcgacatccggcatgccattgccattgactacgatcccctggagggctacgtgtactggaccgatgatgaggtgcgggctatccgcagggcgtacctagatggctcaggtgcgcagacacttgtgaacactgagatcaatgaccccgatggcattgctgtggactgggtcgcccggaacctctactggacagatacaggcactgacagaattgaggtgactcgcctcaacggcacctcccgaaagatcctggtatctgaggacctggacgaaccgcgagccattgtgttgcaccctgtgatgggcctcatgtactggacagactggggggagaaccccaaaatcgaatgcgccaacctagatgggagagatcggcatgtcctggtgaacacctcccttgggtggcccaatggactggccctggacctgcaggagggcaagctgtactggggggatgccaaaactgataaaatcgaggtgatcaacatagacgggacaaagcggaagaccctgcttgaggacaagctcccacacatttttgggttcacactgctgggggacttcatctactggaccgactggcagagacgcagtattgaaagggtccacaaggtcaaggccagccgggatgtcatcattgatcaactccccgacctgatgggactcaaagccgtgaatgtggccaaggttgtcggaaccaacccatgtgcggatggaaatggagggtgcagccatctgtgcttcttcaccccacgtgccaccaagtgtggctgccccattggcctggagctgttgagtgacatgaagacctgcataatccccgaggccttcctggtattcaccagcagagccaccatccacaggatctccctggagactaacaacaacgatgtggctatcccactcacgggtgtcaaagaggcctctgcactggactttgatgtgtccaacaatcacatctactggactgatgttagcctcaagacgatcagccgagccttcatgaatgggagctcagtggagcacgtgattgagtttggcctcgactaccctgaaggaatggctgtggactggatgggcaagaacctctattgggcggacacagggaccaacaggattgaggtggcccggctggatgggcagttccggcaggtgcttgtgtggagagaccttgacaaccccaggtctctggctctggatcctactaaaggctacatctactggactgagtggggtggcaagccaaggattgtgcgggccttcatggatgggaccaattgtatgacactggtagacaaggtgggccgggccaacgacctcaccattgattatgccgaccagcgactgtactggactgacctggacaccaacatgattgagtcttccaacatgctgggtcaggagcgcatggtgatagctgacgatctgccctacccgtttggcctgactcaatatagcgattacatctactggactgactggaacctgcatagcattgaacgggcggacaagaccagtgggcggaaccgcaccctcatccagggtcacctggacttcgtcatggacatcctggtgttccactcctcccgtcaggatggcctcaacgactgcgtgcacagcaatggccagtgtgggcagctgtgcctcgccatccccggaggccaccgctgtggctgtgcttcacactacacgctggaccccagcagccgcaactgcagcccgccctccaccttcttgctgttcagccagaaatttgccatcagccggatgatccccgatgaccagctcagcccggaccttgtcctaccccttcatgggctgaggaacgtcaaagccatcaactatgacccgctggacaagttcatctactgggtggacgggcgccagaacatcaagagggccaaggacgacggtacccagccctccatgctgacctctcccagccaaagcctgagcccagacagacagccacacgacctcagcattgacatctacagccggacactgttctggacctgtgaggccaccaacactatcaatgtccaccggctggatggggatgccatgggagtggtgcttcgaggggaccgtgacaagccaagggccattgctgtcaatgctgagcgagggtacatgtactttaccaacatgcaggaccatgctgccaagatcgagcgagcctccctggatggcacagagcgggaggtcctcttcaccacaggcctcatccgtcccgtggcccttgtggtggacaatgctctgggcaagctcttctgggtggatgccgacctaaagcgaatcgaaagctgtgacctctctggggccaaccgcctgaccctggaagatgccaacatcgtacagccagtaggtctgacagtgctgggcaggcacctctactggatcgaccgccagcagcagatgatcgagcgcgtggagaagaccactggggacaagcggactagggttcagggccgtgtcacccacctgacaggcatccatgccgtggaggaagtcagcctggaggagttctcagcccatccttgtgcccgagacaatggcggctgctcccacatctgtatcgccaagggtgatggaacaccgcgctgctcgtgccctgtccacctggtgctcctgcagaacctgctgacttgtggtgagcctcctacctgctcccctgatcagtttgcatgtaccactggtgagatcgactgcatccccggagcctggcgctgtgacggcttccctgagtgtgctgaccagagtgatgaagaaggctgcccagtgtgctccgcctctcagttcccctgcgctcgaggccagtgtgtggacctgcggttacgctgcgacggtgaggccgactgccaggatcgctctgatgaagctaactgcgatgctgtctgtctgcccaatcagttccggtgcaccagcggccagtgtgtcctcatcaagcaacagtgtgactccttccccgactgtgctgatgggtctgatgagctcatgtgtgaaatcaacaagccaccctctgatgacatcccagcccacagcagtgccattgggcccgtcattggtatcatcctctccctcttcgtcatgggcggggtctactttgtctgccagcgtgtgatgtgccagcgctacacaggggccagtgggccctttccccacgagtatgttggtggagcccctcatgtgcctctcaacttcatagccccaggtggctcacagcacggtcccttcccaggcatcccgtgcagcaagtccgtgatgagctccatgagcctggtgggggggcgcggcagtgtgcccctctatgaccggaatcacgtcactggggcctcatccagcagctcgtccagcacaaaggccacactatatccgccgatcctgaacccacccccgtccccggccacagacccctctctctacaacgtggacgtgttttattcttcaggcatcccggccaccgctagaccatacaggccctacgtcattcgaggtatggcacccccaacaacaccgtgcagcacagatgtgtgtgacagtgactacagcatcagtcgctggaagagcagcaaatactacctggacttgaattcggactcagacccctacccccccccgcccaccccccacagccagtacctatctgcagaggacagctgcccaccctcaccaggcactgagaggagttactgccacctcttcccgcccccaccgtccccctgcacggactcgtcctgacctcggccgtccacccggccctgctgcctccctgtaaatatttttaaatatgaacaaaggaaaaatatattttatgatttaaaaaataaatataattgggatttttaacaagtgagaaatgtgagcggtgaaggggtgggcagggctgggaaaactttgtacagtggagaaaatatttataaacttaatttttta

SEQ ID NO: 25 - protein, 1317 aa, Mus musculus
RQPPFHTPCEEDNGGCSHLCLLSPREPFYSCACPTGVQLQDNGKTCKTGAEEVLLLARRTDLRRISLDTPDFTDIVLQVGDIRHAIAIDYDPLEGYVYWTDDEVRAIRRAYLDGSGAQTLVNTEINDPDGIAVDWVARNLYWTDTGTDRIEVTRLNGTSRKILVSEDLDEPRAIVLHPVMGLMYWTDWGENPKIECANLDGRDRHVLVNTSLGWPNGLALDLQEGKLYWGDAKTDKIEVINIDGTKRKTLLEDKLPHIFGFTLLGDFIYWTDWQRRSIERVHKVKASRDVIIDQLPDLMGLKAVNVAKVVGTNPCADGNGGCSHLCFFTPRATKCGCPIGLELLSDMKTCIIPEAFLVFTSRATIHRISLETNNNDVAIPLTGVKEASALDFDVSNNHIYWTDVSLKTISRAFMNGSSVEHVIEFGLDYPEGMAVDWMGKNLYWADTGTNRIEVARLDGQFRQVLVWRDLDNPRSLALDPTKGYIYWTEWGGKPRIVRAFMDGTNCMTLVDKVGRANDLTIDYADQRLYWTDLDTNMIESSNMLGQERMVIADDLPYPFGLTQYSDYIYWTDWNLHSIERADKTSGRNRTLIQGHLDFVMDILVFHSSRQDQDCVHSNGQCGQLCLAIPGGHRCGCASHYTLDPSSRNCSPPSTFLLFSQKFAISRMIPDDQLSPDLVLPLHGLRNVKAINYDPLDKFIYWVDGRQNIKRAKDDGTQPSMLTSPSQSLSPDRQPHDLSIDIYSRTLFWTCEATNTINVHRLDGDAMGVVLRGDRDKPRAIAVNAERGYMYFTNMQDHAAKIERASLDGTEREVLFTTGLIRPVVVDNALGKLFWVDADLKRIESCDLSGANRLTLEDANIVQPVGLTVLGRHLYWIDRQQQMIERVEKTTGDKRTRVQGRVTHLTGIHAVEEVSLEEFSAHPCARDNGGCSHICIAKGDGTPRCSCPVHLVLLQNLLTCGEPPTCSPDQFACTTGEIDCIPGAWRCDGFPECADQSDEEGCPVCSASQFPCRQCVDLRLRCDGEADCQDRSDEANCDAVCLPNQFRCTSGQCVLIKQQCDSFPDCADGSDELMCEINKPPSDDIPAHSSAIGPVIGIILSLFVMGGVYFVCQRVMCQRYTGASGPFFYVGGAPHVPLNFIAPGGSQHGPFPGIPCSKSVMSSMSLVGGRGSVPLYDRNHVTGASSSSSSSTKATLYPPILNPPPSPATDPSLYNVDVFYSSGIPATARPYRPYVIRGMAPPTTPCSTDVCDSDYSISRWKSSKYYLDLNSDSDPYPPPPTPHSQYLSAEDSCPPSPGTERSYCHLFPPPPSPCTDSS

SEQ ID NO: 26 - DNA, 137046 bp, Homo sapiens
atggagcccgagtgagcgcggcgcgggcccgtccggccgccggacaacatggaggcagcgccgcccgggccgccgtggccgctgctgctgctgctgctgctgctgctggcgctgtgcggctgcccggcccccgccgcgggtaggtgggcgcaggccggccgggggccgcgggttgctcggacaatggcccgggcggccccgcggccaagtgcgcgggcgccgccgccgtctcggaagcgacttggcgagttgggagcgagttggggcgcgcgcccgggatccccctgccgtccccggcgtccccgccacgcgcgggccctttgtctccccacccgggccctccccggggacgctgcgtcccgggctggcgaggagggcgcccgctccgccaggtgcggcgcgggcgggtcctcacctgcccgagcccgcgggaagccgggagccgagccgagcccgcgctgggcccgtgtggcccgggccgggcaccgagcggggacttggggcgcggaggcgggcctggcccggggagccggttcgcaagcctgtttccagcggccgcgcggccgccccgcgtgctccgaggacgggctgaagttgcagcgagaaagttctgagcccgggcgcggggcggcctggccggtggcgctgctcctgtgagccgcgtggctgtgggtttccaagcggactgacacctgccaggtgcccgggcgacccgaatgccccgtgtggccgccgggtccccagatagtgtccatccccgggtcggctacgcggaggtgacgtggtcccagatcgcggggcagtgggggaggcaggcttgtgcctcagttgtacactcccgtggggagaggtagggcgggggaactttctctccaacttttggtgtttcccagggggtggagttgaggtcaggaggactcaggaaacttaagcagtcgtgaaacgctacacatgttcttttaatttggagattgccatgtggtttttcaagcaagcctcttgctacctaaatcattctcttcggatgtgcgtgttttgtttttctggagtatggctggccaagtggcacggccgcaagtgcctgtgcacgccgcggctcctgttctgtttgtggcagtttagcggggaggacctcgggcccctttgtctgggcctccttaaggcaaacagctgtctccctgaatatttccagtgtgaatggtgcagcggggtggccctgtagtcagatcccccaggctgcagcctctgcttggaggtgtgggggacagcggggaacaggaggagcttggagtttgtttcacgtcctcctgcctctgacccaagcctagagattctatggacagtttcaccccaaatctgcctctttcaggagcgtgtttacattgtggggccttgtctggagctagcaaaacaaggtgaagacaaaacagcgacagtatctggggagtacaggccagcgccgctcctttttccggaaatgcctgggtcaaggaggcaaaaggggttttggggaaactgtttgttttaaagggggggtttctaggccgaccgcgttgcctttcacctcattgcagttttgggttttgtgcacgttttggggtgatgttgctggagtcaaatgcctgtcgtccatgtggttcgagcccctgaggagaaagaattatagctgtagagttcagttgtgtgtgaggcaaaaatagagttgattattttaacattaggcagcaaggcctgggagccccagtgaatgtggtgatccaggcctaaaatggaaggaaagggaggaatctttctgcagaacggttttgatgttatatccctggttttactgtgtgaaatacatgcctcggacctcagcgaagccagtaagtgggccgctaattatttttcctgattgcttcctgttgcaattggaagctgtgaacgcacggaaatggctttgttctagtggtcccagtgctgagaacttccccagctcccaagccctagtcctctctcctcggggcccaagtgcttgttccagggccggcctgtccaggcaccccctctccccctggaggttcctcctgtagatgcccaaggccaaggccgggccctctgggagagcccagaagggctgagtggggttaaccaagtgctgtgtggagcaccctgagagagtcccctccaaagcagggccccgtgtgtttagctcccctcttcagttccaagaaattcgccggtgaacccgatccagcatttgttcagcactttcctggggagattcacctcgtgcttcctgtcgtttttggaacccgtttaatttcagccgtgctgtgtcactgctcaggcatttagtagaactcacacacacgggtgggggatgtaggcaggtgaggcctctgagttgctttctcccttgcagcgacgggttgcagggctgatgggggtggaggggtttggggtcagacccacctgggtttacatgctcagtggctgtttgacttcgggcaccatacctagtttctgttatctcaccccgttcctctcccaggctatggggagccctaactgccctgtgtgagacctttagccccatccctggcagagctgcagtgagcgcagttgtgtgtcagcgtcctcgatctttctggccccagccggtctagaggctgttattacaatagtctggatttttcctgtatgaccttggacatccagtccactgacaaactcactcactcaccgctgcagccctcgggggcaggagtagttagttagcactgtggacagagcccctgcgcccagggtctgattccagcctggccgcttcctgtgctgggaggcttaggaagctgatgctacctttgtgtgcctcagttttctcacctgtaaaatgggaatagaatccttcctaccatgaattcagtgagttaacgtgcacctggcccggtataatgctgttgctgttttgctttggtgtctgctaccgagtgaagtgctagggttgagtgcgatagaatggcagataaggccccgcccctgcgggcagagcttcccatgtagaggggaggacagggaaagaagctttgcagctatgcagaggtgggcccacgggtgctccttcaccctcggggtgtcctgcgagaggcccttagaggccagatcatgctgtggagtctggttgtgatccacaaggcagcggaagcttctggaaggctttaggcaggagttacaggaaatgcaagctaaagccagatctttcctaggtgaaaggtgtcgagttgttttttttttaaattgaggtgaaacttatataatataaaatattaaagtatagaaggcaggcatttggtacattcacagtgtttacaaccctctcttctatcaagttataagagatttccatcaccccaaaataaaacccatacccattacacggtgacttcccgttccctctccccggatcccctggtgaacaccagtcgactttctgcctctgtggttctgcctgttctgggcattttgcatgaagggaatcttacaatgcgtcttcgtggctgacttccttggttactgtaacgttttcaggagtcatccaagtagtaccacgtatgggtgtttcagccttttattttttttttgaaatggagtcttgctctgttgcccaggttggagtgcggtggtgcgatcttggctcactgcaacttctgcctcctgggtttaagtgattctcctgcctcaggctcccaagtagcttgcattacaggtgcccgccaccacgcccagctaatttttgtatttttagtagagacgggatttcaccatgttggccaggctggtcttgaactcctgacctcaagtgagctgccggcctcggcctcccaaagtgctgggattacaggtgtgagccatcacgcccggcctatttcagccctttttgtggctgaataatattccattgtgtggagggaccacattatatttgtcagttcatccgctgattggattgatcttggttggttgcatctcccagccggcacgagcaggtctcatgcctcctgcatcctggtggaggtggctggtgggaggatctggcctgagactctcctgccgaggttcaggaacgagccaggtgatggggacaagttggggagtcagtgctggcatctcagaggaggggcctgggccctgagaggagtgctgggagggcagagtgagggccaagttcaggttacagaagccgtgagacagccggacatctgtggtttgtgaggctttggaaacacttaatgcgctctccaaatggggagtctgttggggaggccctggcgggagccggggctacatccaggtcctcggcttggtggccttgttcacttatttgttcaggaagcagcagggtgtgggctctgtgccaggccgccctggagggctgtcctggggccagtgaggtccaagtgtgatgggcggaggcagctgtggcttgctacgagccggcctcagggacccaccggctggctccggctgctctctgcattctcttcagctctggagagccgtgtgccagccctcagcctcagtttcctcatctgcaaaatcgggacgatggtgtccaccttgcccatgctggtggggtcccaagagctggtgtctggggtgagggagctgggggccaaaagctcctgccctggggcatccagctgtcctttgaagagtaccccgagggtgtgactgagagccagtccccagcacccttgtccagatggggaccaggaggtgggtgaagatatttggggtctgagctctgtgctggttgcccccgagggggcctggagccctgagttaggagcagaacggggtgctggtcctatccgttccctacctgggtagtgggggctgccttcctgggttgggggtggggggagctccctgtgtccctaagccatgcagaggcatgcgcatacgcgctgctcttaggcatgtgggtggcgctctgaggtccctgcccattccccagccccatgtggtggtccctgtgctccaggtccagcctctggtttccagtttgtcctagtttgtcaccttgtagggggcagttgacactttgctggcctgactcgtggtgtgccagagcccgtggctgctgggcgactgtgcctctttctctcagtggcaagagccttattttctaatagagcctgatgggccagaggttccgccacagggacactgttctctgtctctcgtgcttggggtctcttgctgtggaccccctgggaggttgtcctgggggtgcggggattgtgttttctgggtattttcttatttgctctattggagtgtatttaatttaatatatatattttaaacatcttttagtttgccttaatgtaattttttttgagatttaatttttttttttttgagatggagtcttgctctgtcgcccaggctggagtgcagcggtgtgatctcagctcactgcaagctccacctcccagggtcacgcctttctcctgcctcagcctcctgagtagctggaactacaggcacccgccaccacgcccggctaattttttgcatttttagtagagacggggtttcaccgtgttagccaggatggtctccatctcctgatcctcccgctcggcctcccaaggtgctgggattacaggcgtgagccaccacacccggcctgcttttttttttttttttgagtcttgctctgttgctgaggctggagtgcagtgattcagtcaccgcttactgcagcctctacctcctgggctgaagcaatcctctcacctcagcccgcaagtagttgggacctcaggtgtgcaccaccacgcccagctgattttgttgttttttgtagagacagggtttcactatgttgcccaggctggtcttgaactcctgggctcaagcgatccacccacctcagcctcccaaagtgctgggattacagacatgagccactgcgctgggccttaatgtagtttttcttgtggttaaactgaggtgaaggttcactcaaggaggaaagtggtttttagccttttgaggggctcaaggaccccttcaaggatatgacaacggctcctctcctgagaaggtgcctggtgggggcggcacaggctccactccaccccattgcaagaatccagggccctgcagggctcagagccctctccctgcctccctgtggggcattgagaggcactcaccttctgagggcctcagtttcctttttttgtaaaatagaaccagctgattccaatctctatggtctcttctagcacggagcttcacgttttttctcccttcaggatcctgaggcctctggatcgctagagattgggggtgcccccagaagaggcgctgcttctgtgccctccctcaccccaccgtgcctggctccttgttttttttttttttttttttttgagacaggagtctcactcacgcccaggatggagtgcggtggcacgatctcggctcactgtaacttctgccaccctggttcaagcgattcttgtgcctcagtagctgggactacaggcatctgccaccatgcccagctaatttttgtatttttagtagagacagggttttgccacgttggccaggctggtctcgaactcctgacctcaagtgatctgcctgcctcggcctcccaaagtgctgggattacaggcgtgagccaccatgcccagcctgcctggctgattttttaaaatttgtcgttgagatgggtgtcttgctttgctgcccaggctggccttgaactcctgggatcaagcgatcctcccacctcagcctcccaaagtgttgggattacaggcatgagccgctgtgcccagcctattttattattattattatttaattttattttttctcactattgcccagctcctggcctccaactcctgggctcaaaggatcttcctgcctcagcctcctgagtagctgggactgcaggcatgtgccatcacaccctactttgtacttttgcttttctgtctttgctcttgttaaaagccaagtgccatttcatagtacacaggtgcacttgacagcatttacctgattgaggagtttttccagccttcattgctattacaaagcatgcttgctcgtgtgtctctgcatgtgtataagtgtttttataggatacattcctagtcaaagagtgtgtccatttctgtttttaaagatattgaggccgggcacagtggctcatccaggtaatcccagcactttgggaggttgaggcaggaggatcacttgagtccaggagttcgagaccagcctgggcaaaattgggagaccccccatgtctacaaaaaatttaaaaaattagctgagtatgattgcacactcctgtagtctcagctacttgaaaggctgaggtgggaaaatctattgagctcaggaggtcaaggctgcagtaagccatgatcacagcactgcaacagatctagcctgggcaacagagcgagaccctgtctcaaatacatacatacaagcatacatacatacataactcctaaaaggctgtagcagttcatacctgcaagcatctacgagaacacacactttcctatatcctctctgatgctggcaattacaagattttggtttttggtgttttctttggtccagtttggttaaaaattataacaccttttgatttgcacaaccctcatttctggtttattggtatttacttttctgcaaattgcctacacttatccttggcccatttttctgttgtctttttcttttcttttttcttcttcttcttttttttttttttttgagacagagtctcgctgtgtcctccaggctggagtgcagtggcgcgattgccatcttggttcactgcaacctctgcctcccgggttccagctgttctcctggctcagcctcccaagtagctgggactacaggcatgcgccaccacgcctggctaatttttgtatttttggtagagacagggtttcaccatgttggccaggctggtctcgaactcctgacctcaagtgacctacccatctccgcctcccaaagtgctgggattacagacataagccacggtgccagcctgtttatctttttcttatagatttgtgggaggtctttatttggtatggactttaattctttgttctgtttgtttcaggtttcactgctggtctgtagctagtccttcatccttgtttctggtggtacattatcataaagatattaagaagcttcatataatcataactctactttttccctatggcttttttcctatcccttgttactccatctccagattataaatatatcctccattattttcttccaggactgttactgttttatgttttacattcagacattattctgtctgggttttttttttttttttttttttgtatatggtatgaggtaggggtctggccagtgaatagggagttgtccaacaccttggtgggatggtccatcctatccattcattgtaaatgctgctcttttatgtgtagtgtccacagacacctgggtcctgattccagacccttcactgtgctccactgcctgtgagtgtctttgtgtaccggaatgctgctgtctccatctctgaagcatcagaacatattttaagatcagttatgtaaattcccacctcattgtccttttcaaaagacgtattggctctgcttgcacgtttatgcttttgtggtgaacttcagagccgtcctatcaggttccaccctttgatctcttgatctggggacggtaaatggtgatatccagcaggtgtcagagggctggattttaaatggcctccgatgagctggcggtctcaggctgtggaagtgaattcatctgctgggtgcagtggagccggccttgacatttgtgggttttgctgacatttgtggaaggctctggaggtgccctttgtgccgacttgcccgagccactcctgctgcccaactcactccggtgtctgctcaggaaagaaattctaatgcacactaattttagcattagcccgatggcaaatataattactgagttaattatcactcccctccctagttaatcccagagcaaaatgtgggcacctttcatttcttccttgggatgtacccctgtattagttcagatggggaggcggtacctgcctggcaaagctctcaggaaattgctcaacggggcattaatagctatctgagcgtgtggcctgggctggaacacaccagcctgggtgctgggtgccttccaggctctggccaccttgggttctgccccaggaaggagcagactgtctcctctaggggacctgaagcttaacgtcctcactgtacgagatagttttggagcaagatatgttctggggcttgcttctgcgggtaaaggccatttctccaaactttcccccagagcgaacttgcttcccaaaaggagtctggatccgggcgtggccgtgctgccctggccgcctcctcacttcagctggagcctccgagctgacgtccatgcctattcctcctgagcactgtagacacaggccccagctctgtcccctgccctctcctccactcagactccctgggctctgaggctttacctacaggccctgcggtgcatattcagtgaaagcctagattcagagccaatgacatcagcttttacttggtctccttgctttctggaacctcccctttgcccatttatcttatgctctggccagattaatttttctccaagtagttttcatcacatccttccctttctcagacagtcgtgcccattctccagcatctgaagttggaactttttggcctggcaggccgtgccgccctgagcagacctgcccatcttctgcccctggtgtgggcacttctcttgccagatctgtctggaaccttccatggtccacccaacctgggagggccttgaggacaggggctgtcttcgtctgcgcccctctgcctctagtgtgatgtctggtagatgatcagtaactgttctgaggccaaggcctcatctgtccagggagcagatcttacccatcttttacctcctctggctcgaattctgctggagcatgagctccctctagcctaggttgtagaacacctgtctggctatgtgacagcttctgggccaagtgtgaggacccccatggtcctgcagtaagagcccatatttctggggtgtgggaaacccagtgtaccccaaagggacttgactgtgaagtcccgggtccacgtggtacccaccagcctcctagggcccagactccgtgagatgccacggtgggggcttgggcatttgcagccttcacttggcattcttaccattttcaggaaactttatataaacatttttaatcatgcaaaaaaggaattatggaataataaatgtttatattaaaaagtcttggtggttttgattgatttatttattttttgagatggagtctcgttctgtctcccaggcttgagtgcagtagcacagtcttggctcactgcaacctctgcctcctgggttcaagcagttctcctgcctcagcttcctgagtagctgggattacaggcacccgccaccacgcctgggtaatttttgtatttttagtggagatggagtttcaccatgttggctgggctggtctcgaacttctgactcaggtgatccacttgcctcagcctccctgagtgctgggattacaggtgtgagccaccaagcctggcttggtgctttttaaatttattttgagatagagtctgactctgttacccaggctggagtgcagtggtgccatcacagcctactgcagcctctacctcccctgggttcatgtggttctcccgcctcagcctcctgagtagctgggactacaggcacacaccaccaggcccaggtaattttttaaaacactttttttgtagaaatggggtccctccatgttgcccaggttcatttggaactcctgggcttaagtgatcctcttgcctcagcttcccaaagtactgggattataggcgtgagccaccgcgcctggctactttggtacttttgagttaaaactatagagtaggtgactgagtgatatttttaatgcgttctcaagaatttgaacacgaagagagtgtcaccctcccaggttatgcccccgggagttcatgcacttgccacctggtcgctgctcagggggcccagggagtttgctgcagtgccggaggactcctgggtcccggctgtgcctccccgcagccgcctgctcccttgggacactcattcatttgctgtggccactgccgcccacagtccttgcctcgtagactccactgcagctctggttacaaagagcgagtggtcagggactcctgacctgccatgcagggccccgtgggcttgtggtggctttggtgccgtccgctgcgtctgcctcttagagcatggagttctccttctcaggagggctgagctgctggagctctagtcctgccgcagagcagcccccaagtgcggcgttgcctgtccctgtggagcaggtgactacctggctgcgggcggaacagcaggccatggctctggtagtggtctgtgacagcatatcaccctgtgggacagatccccgggacctagtggggtgggatagtgagagctgcgtccacaggggaggctcagagacttgtgtgcccagtgtggccctgtgtgctgacccagctgggctctgccctgtgtggcccccagggtgcccggcgtgtgccctgatggcctggggcagagctccagagagccacggctggccgagggctcacggattctcacccgcccccagtgcctcaggagacacctgggcagcgaacagcttgaggtgtgcagaggatgggtcacgatgggagggaggcacaaggggtgctttccatctctttggccaccagttttaattaaaaaaaaatttccatctgttttgaaaggttttatcctcttaaggaaatgacgtttattaagcaacagccccttctgctcatcgtccagctgtgcccactggcagagcagaggctggtgggattccgcctgctccacaccaggaggtgccacttggcttcccagtgtcgaaggccttcttggactcagcacaccttcacggccccgtgggctgtgggtccctgggttgggcatgactgacttggagggtgatgagagatctccaggatccaggcaggtctggcacgccactgggtgctaggcgctgggctctgggcggcctccttgctgtgcttttctctgagggttgagggagccctgctcagagaccaccaggtgagctctgggggtccctctgggctcctgtgccctgcacagcccggttctgaccacagacctcctccatcagggtggactatagcccagagcgggataccaccacgcccatcaccccccacccctggagcccctgaccaaggcccttctgggtacttaaccagtgatctgatctcaccacagtcagggattagggcctctcccggagggctggggtccaatggtatgatgtgtttcaggtgagaaacaggttcagggatgtccccagcctcactggctgttgttggcagagcaggatgaaaggcagacgggaatgcagaattgggatcttgccctgacccctgtgatccgtgaggcccttgagctagagggatgcactcagtcgaagtgcccgcctcttgctttgtgttagtgtgaagaggaggggtgggccctgttctattcttggctgcccacagcacctaaggccagcttggtcaccaaggcatgctggaaggtcaccacaggtggcacaggtggcttggggtgtgctgggcagcaaccattatgcagcagtggcctccaagcagaagctgctgtttcggacacccgaggtattcccagcctccttcccctaccccgaggtttgctggagtcactgagggggcagtagcgagctgcaggtgcagggtcggggtcctgggggttgcgtgtatgcgcagcctccagagaagcccatgcaggcccccctcacccgttcctgcctgacctgctgttgtgtcctgctcctagctctgcggtctgggacaagcacgttaactgcttcagagctcagtttccccatccgtgatagggaatgatctttatgctcccacaggctcgtcctgaggctgcagagaggcagcgttgaaaagtacctagctcagggcctggctcagtgacggttagctgttagggttaccatcgcatcgcaattgttactccatagtgacgaccccccggggactctggacttgttcagctcagctgagaggctgcttggccgaaaccatctcagctctgcatagtgtggcctggtggcctgtgggttgcgctcatgacaacgtggagcctattcagtcggtaccgagtgtgcgtccttgcctagctggcctcggcatttattttgtagctggagccctggtgggatggggtcaggtgggctctaggagtctgggggacaggtgcaggtaccttcgggtgcgcctcccctgggggcctctgctttgtcagaagtatggcagggggctgagggctgactatctatttgtaggtgtcaccagagcagtccccgcctctccttttcagaggacattgttgaggggaccctgccatctgcgtctgggctggctgcttcctctgtggggggctcctcccggctgaccagcagccctttctggccccctgcatcagcgcctccccactcagcttcactgctgaaggcagggccagcctgggcaccaggttcttccccctctgcccaaggtccctgcccacccgtcttccctcgccctggccgtgacggtcagtgcctttgccccgctctgacgaccaggccctgtgcgcagttggcgctccgtggttgctgagagatgtgctctccagtctgtgggccagatggggcctctgaagtggagggggcccaccctctctcctgcagcctgctgtggctccccatcgcctctgggatgagagcagaccctgcgaagccttgagctcctggccctccagctgtgagcccaggtgggaccacccagttacaagagcgttaggcctggctgtgtaggagacgtgtgtctccacaccagagtccttgcggcacatgggaagccttcatggtcctcatggtggggaggggtccccggggaggcatggagtctcgctcctaggttgctgtgtggcttcagcgctctgtacctccatgcccctgtcctgcagatgtcaacacccagttgaggagaacgtggactttgcccagtgttgtgcagggatggtggggccaggctggagcccacgtgtcctgccttcgccctggccaaggtgggggttatctgccctggccaagctgtgccgcccgtccctgcccgccccagcaggtgggggcctgcggtgggatcccacccatgagcagtagaggcttgttgacttactggcctcccaggctccccctccaaagccaagtcctccaggacggttcttgcccctgagaaggggcagtgtgggtgctgggctgcagcgagcccctcttcgttccatttcctcacagtcttggggacggagggcttgtcctggagcacaggaccgggattgtgctgaggtcctgggaggccacggtcatgaggggacccagtgaaggccaggaggggacaagcatccctccaggtatggggagggtcaccccagcgcctctgcggatctgacccactggctgcggctcctgtgcttgacccttttggcaaagatatgcagtggtctttcagttgcccccccttaggcagcatgaaaacaatttaactcttgcagaaagaacctgggaattgatctcccctgtcactgatcccacaagtgtgactttgcattggtttcttggtccccttgtgcccagtctccccatctgtaaaatggggtgacagtagttccacctcctatgaggactgagtgaagtcaggaaccagaagcagctcccacatgagactcagaaagtgtgacaggcgtggagggtagggacccatgaagctaggcccggcaccttaggaagaagagggagctttcctgcaggtttcccccggacggaatgtgtttcgtcctgtgcacctgcctgcagagcccctcgcacgctgtcagtccacaatgaatgcttggtggaagagttcacccagggcctgcaacaccatagtgctcagcttctccaaattcttcttaacttccagactcgacacgtaaacttgattccaaggaaatcaaagctgatcgtcaacactggactttgcaggcagctcccaaacccacatgcatatttacaactaagaaatgccagttcctcaaagaatgttagcctctgagatgcatcaggagaccaggaggcaaggggttaaaggcaaaccgtggcattccccaaatctgtccagttccctggcatggtacagtgtcgcggagcccgaggtggcatcttttgtttggctgctgatggcggccttcgggccttggcatccacgttgctgcaattttccaggaacagtaatcatttgaaagtagagctgccacgttttgctcaataaagggattttgtagagcgatgataaatttggcatgtctttattattattattttttcaacacttaaagaaaataaaagctggtacaaaggtatgtttgtttctgaaatgtgtttccttccccagatgttcttttctgccagttctaaaatgcgttctgagctcggtcctccagtttcctccctgtgaggaagaacaatgagacctttgtaaccacacaggggaaacggccgcttccctctgcagtgggcatgggggaggggctgggacgtcccacctcctcccacctcgatggaaaccacgagtctgtgccagcccagccgactgtcggggggtttggcagcctcctttcccatggtggtaatttgcagggtcatggctcaggggcaccgcagtctgcacctccgtccctggatccgtgcgtttgctgtgtggcctcgcagtaaatgcttccatctgcgtggcatttatggaccctggggcttggtactgtctgtgttatctggagtcgaacttgcccttttccttttctgtctgcctttcttgcatcaaatgctggtccccacccaaagggtagcccagtctgcaggacacggcgcagaggtagagttggtggcttcacgagggtccagtggggcacagaccttcctcggctgctctgtcgctttgtgacttgagactgcgtgggtggggtacctgagggatccgtgagcccgcccttcccacacgtgtgcatgcacacacacatgtgcacagtgcttcagaagtaccaccttagttggatttgaaggacagccaagagacctgtataaagcttgtagttagagtcgtttcgatactggcctgaattaagagcagtctccatggggttgctgtctgtggggtacgtgtttaatgaaaatccttgtttttaaataaatgtatcctgctttagaacacccaagatataaaatctagacttcatagacaaaaatagctaacatttgttgtgtatcacagtgtgccaggtgggctctaagagatgtttgatttctttaatccttccagctgccctgtgggctgggggccatccctaccctcattttacagacgaagaaactgaggctgggagaggtcaattaacttgctcaaatttggtataggcaaaactaggaattggcagacggtggttccagtgcctgccttttaattggtacttgaattatacgagtgttttcttccatcaataaaagaaatcggcgaacagcctcccatgggtttcagtaagtgcaagccctccttgtcatcccagacctcagcctgcccatttaatggatgaagacactgaggcctggagggaacagtgacttcggagccactctcctggactctgccactcctctcgcctcccatatgaacctgagtggccacatgaccctgggggagagctactcaactgtcccaaggagagggtgatgactgctggcctcccaccggccatcagcgccccactgactgacacccctgagtcagtctccaccctggaactgtttctctcactatttgccatggccttgggccgcttccgggggcttggcaaggcaggaggcgtggaaccaagatggtatgtaatcagaatgctatattttgttgaaaataagaatgttagtaatgggctggtttctggcaggtcaaactgggactctgaaatacatatttttctctgctctgccctaaaccttctaattagtgaaaacgcacatttgcagacatcaatcaaatgtcatattccctagcagcttgtcctgggatcactgagctggtcacattccacagttgctaactcagggcttgcagagtatgtgtgcacgtgtgtgtgcatgcgtgtgtttgtgagagagatacatgccttctggggagccctggtggcctgtttccttccctcccaggcccctgagcttctgctccccaccccgcccccagccccttgtcagcacatgcgcggccactgcaatgagatacagacgttcgcccaattaaaacacagttagtggaggacacatggctttcagggaaaactgctttctctcaggaagatctctgctgtgcagtattccatagctagaccccagctccactcaacagtggactccattaatagcctgggttttggaagaggcgatttgcttctggtaactggctccggtgcatggatgttccctcctcttgctggaatctctgcccgacccagacagtgcttgtgaaccagccctggtgggctccatggggttctgggtctgggaggcaaggacttgcctggggtcattctcattctgcacggcactagccatgctggctgcatgaagccgtatcacagagacctgtgggtcctttacatctgatcatcctgtcatttgtatctgtatctggggtggttagttgcaaacaattccacagtagccaaatcaagaaagtcactggctctcgcaggagcgcgattggtgtggggcgagcctgggggtgtagcccaggcaagcccttcaccctgatgcgcattagccttcttatccaggaaatggggggaggcggtctgggcccagggaggggagcatgccaagctggggatctccaccggtccaggattcagggcgcctctgaccgttctctgcccagtgcctcctgttcagttttacttttgtgttttccatttcacttctgcctctaggccagtgtttttcaaaatatgtttcctgagtggaaatgaaaaaatgttctgtgatcaggcgcagttgggaaatcctaggggagagaaagtgaactaggcttcctcaccgcaggacttctcagagcctttaaaatggtaattatgctccaggccttgtgcccctctacctaggcatcctttactggttgggaagagacggcaggttacgggtgagtccgggtaagtggagttgtgcctaagctgataacctgacgtcaccaacactgttctgtcaccttgctttggtgtggcttcttcacagttgtcacatctgggccgtttggagtgacctagcaagtcctttgcttgtctcccaggactttccggagtagccaagcagagccttcggccagttcccttgtggggccaggccctgcccgggagcacaggcaggagaacagctgcctccccgcctgccccagggccttggtgtcagggccatagcccccagctctgcggtggagcagcagggacctgcctggcccatctccctgttgagggaagacccggaggcgcctgtcctgttctgtgtgctccgaggtgtctgaaaccagctacctcattttctttttatcttttgcaagtgatttcttatttcctgctccacccccaaacgtgccccctgtatgtttcctgttcgcctgcttccctgacctttgaaatgtggtccctgctcgggaaacttgcctggacctcagtcaattatggttttcctctgggctgtgtgtgtgtgtgtgtgtgtgtgtgtttgagtgtgcaagtgtgtgcattaggattagagagaattcgatggggggccaggggccaacaggaatgggggtggctgagctgagaggccaagggcaggttccaggttgcattgagagccgaagctggtgagtgtgaggcgggcagatgtgaggtgtgtgtggggagtggggtgctgtctgggtgactgggctgggagagggcaggtgggggccaagctggaagaggtggtgttattctgtagcacctgatgtacacagaccttgggggtgcagctccaggctttctctctccccacccgcccctgaaggccccactctcccgccttctgcagccagccttccttttgtctgcccctgagctcctccgctcttgtggtcgttaagaaaagctttttataatccaagttggtttgggaagaggcaaactgtcctttcccaacagtcatatgccaaccctggccacatctattctggatttgaagcaaaatatggtatttattcattattgtcatgcaaatgtcagcagctcgctcattcttgatggagacagcacctggaatgggagggatgggtccacggccagcattggaggtgctcggccccagcacccgggccttgctctgcaggcagccctgctctgcaccgggccctgctctgcaccaggttccactgggtggcatcagccatgcctgccctgaggaggtgaagtgcgggctctctccagtgaaggtgcagaggcagggtgagctggcgggcttacggaggacgtgggcttcacctgggtccaggaggccaggtcacattcagccaagtattcatcagctgggtgtagagaccagggagggtttttaggggtgggaatggctggaggcatggaggtggtcagggtggagtctacgggagacttggtctactctggtgcggtgggattcatgtagagagagcccttgtgggctgaggccaggctgtggggtagatgggagagacctcctggcttagcaggtccttgggtggatggatggacggatggagggatgttgggggaattggtgggatatagatggttcagccaaggtggaaatgggggagtagagctattcctggggtgcttgaagatgtcagcaagtatcccactccagcttgagtttgcagagctttctctaaaaggcagaacatgtgcttggttaaaggaaacccaagattttattattgttgtaaatgtcaagtccctcattttgaatctttagacaactgcagaattgtgtcactgacttgggtaaaagcccaaggaaaaacatgaaattatgttgccaaaattgcggtcatcgtagctgcatgagggtttgagtggccaccgccaccccagtaggagagacgcgtagatgttgaatacactgtgagctgcgtgcaggtaattgaaacgtggatgtggggaaggtccctggcttcatggaactgtctacataaaagcgagcctgggtgtttcctgtttcttctaccttaagaaatttccacgagaagctaaggtatggttttgccaagaatgttgttaatggcccagcaatgaatattttcagccacttgtagacacctgaacttcattcttggcaaacaggtgtatgattcttggacttggagagactgaactttgctgtgctcagaatggaggagaccagctcacttgtactttgatttctccctggtccctgtcattttagcctgatcagtgctttttcaagcatttccccttgaaggggagataggactttctggctcagggatggggaggcttccaggcagccttaaacattgtccctgccccaccctaagtatctttgaagtttcatgttttatcataaagtctgtgagaatgttgcagactccgttatagtcatgctagttttatttttttaaatgtggtttgaattttatataaagtatatggattatatctgagaactaatatgcaaggcctgtatgcaaaacataatacaactttacagaaggacattggagaggactgcagtagatgttcacggataggaagacaggagatggagatggcagttgcccccagattgatcagtggattcagtgcaggggccggcagtgcgctctcctccctgttctttcctcccaccccattgcacaaatgttggtgcctggcatttaaagaagcagaccaggcgcggtggctcacacctgtaatcccagcactttgagaggccaaggtggatcacttgaggtcaggagttcgagaccagcctggccaacatggtgaaaccccatctctactaaaaatacaaaaattagctgggcgtggtggtgggcacctgtaatcccagctatttgagaagctgaggcaggagaatcacttgaacccaggaggcggacgttgcagtgagcctggatcgtgccactgcactccagcctgggcaacagagtaagactccatctcaaacaaataaataagaaataaagaagcagcatgtcgagggtggtgctatgtagaggtgtcgggggtgattggcatccagcatccggaagcaaggtggggtagggtgcagaggtgactgacagcagaggctactggagcagatgggaagctggttatggagctaataagtaaattgattgagcaaataagtaaacatatggatagtaacacaagccaggctttgcactttggagaaggtgcttacaaacttggacgagacagtacccagacacatagctgaaactgtaggtactgccacgcacacatgcacagaaatagagaaatagtcatagatgcatgtgtgtataaaagtgtatgtaggctaggcacggcagctcatgcctgtaattccagcactttgggaggctgaggtgggtggatcacttgaggttaggagtttgagaccagcgtggccaatgtggcgaaactccgtctctactaaaaatacagaaattagccggttgtgggggcacacctgtaatcccagctacttgggaggctgagaatcacttgaacctgggaggcggaggttgcagtgagtcgagatcacgccattttactccagcctgggtgacagagtgagactctgtctcaaaaaataaaataaaataaaataaaagtgtgagtatacatacacacgtacagttggttcttgttattcttgaaagttatgctccataaagtcactgggaaccctgaattattgaatactgaaccattgctcctaggggaaacatcgggctaggttcctgtgagcctcaggtcacaacgtttttgccaactgttcgatacctgacctggcttttttttttttttttttaagacagcgtcttgctgtgtcaccccaggctggaatgcagtggtacaatcatgggtcactgcagccttgacctcctgggctcaggccattttcctgcctcagcctctccagtagctgggactataggcatgcaccaccacacctgtctgatttaaaaaaatatacagatgaggtcttgccatgttgcccaggctagtctcaaacttctggcctcaagtgaacctcccaccttggcctcccaaagtgttgggattacaggcatgagccaccgcactcagcccataaccttgtcttatgtgtgtttctaagacaccttatttaggctgagtgcagtagctcacgcctgtaatcccaacagtttgggaggctgaggtgggaggatcacttgagcccaggaggttgaggcggcagtgagccaaggtcacaccactggactctaaagcctgggtgacagagtgagaccctgtctctaaaaagcaccttatttactgtatattgttgattcattaacattgaattcatggccaactacgctataactcatacctgaataaagcctctcatgcatattctctctgtaaggcgtggggcagcctcatgcacctaggagcactacacagcagcatatgtgcaggggacattttatacagcaaaattgcccacaaaaagcacagtgatgtggaaagcatggcactagctagaccgagagaaggacacttgcttacatctcgacagccggagcaagaagatggggcgttgtggcctcagttgacctcagtttggaacgtgtgatggtgactcagttttttcacactctgcaagtcagtgagtgattgcagaagtgctgtgaggtttaatttgggggatataaataaatgttagcaagtaggcgagctcaagtacggaatctgggaagagggaagactgtacgtgtatatcctacctccatcagcagagaggcctagaagcaatgaccccaagtagcagtgagcacaccagagcccaggtctgggtttctgaataccattctccacccaaaggagtcagagcttgtccacgaagaagctggttctagggctggggcaaggaaaggtacaagccgagcatggggcatcttattgtgtaagaaagcaaagaagttctggaggactggtggggacctctgggacagaagagccagcttagaggggtgctcactgtccaaatctaggaatatttgaacgtcaaaatgttgtgtacatgccttagcgaccaacccacatttaaaacaaattcctgaatgagggctgtaactgtagtcccaagtcattcttttttgtagctcataatagcccataatattactataccatatgtttgcatttacctatttttattttattttatttttttgagacagagttttgcttttgtcacccaggctggagtgcaatggtacaatctcagctcatggcaacctctgcctcccggtttcaagctattttcctgcctcagcctcctgagaagctgggattacaggcatgcaccaccacatctggctaatttttgtatttttaatagagacagagtttcaccgtgttggcgagactggtctcgaacccctgacctcaggtgatctgcctgccttggcctcccaaagtgctgagattacagtcgtgagccaccgtgcccggcctgcatttacctgtttttaattgtggtaaaatacatataacacttatcgtcgtaaccatttgtaagtgtgaagttcagtggcattaagaacattcatgttgctggtaaccactgccaccatccatctcccaccacaatttaataaatcattgaaaacagactttcttgaccacaaacaatggtgcagcagaagcatcatagatctctgtctgtcctgctggctgagctgtggcatccttccttttttatattgtaaaaactgtaaataaaatgccataaaaacgccagcgttgatctttgtggaacttgcggagctgactgtagaatgtgttgggggtataacaggaccagggcagcccaggtgtttctgaaggagacgaatcgggagggactcgctccgccaggcatcagggcagattgcaaagccttgtttttgcacatcatgccgatgcggggtggacagttagaccaagaggagcccggaagcagacccaggctttggcatcaggagctttggcatctggcagaactcctgtccctggggttggggtgtgaggaggtgtgcagggtagtagcgtgaataactgctttgaggagctgaagctagaaggtgcccagagctgtgttaggtgtcagagaagttgtttgtgaggcattgtgagtagaattaagtaacttgagtgcgtaattgcctctggggatcaggcctgggcatgctcaacattcaccaagtcatgtttgtttttcaatgctccagctcttcctcctccaggaagcctgcccagtctacccacagccaggtctacccacagtcagcccttcctcttcttagaagcctgcccactctaaccgcagccagatcttcctctgtctaggaagcctgcctggttcacccacagccgtgtcttcttcctctaggaagcctgcctggtccacccatagtcaggtctacctcctccaagaagcctgcctgatccacccacagccagatcttcctcctccaagaagcctgcctggtccaccaacagccaggtgtacccatagtcagctcttcctcctctcggaaacctgccaactccacccacagccagatcttccccatctagaaagcctgcctaccccacctacagccaggtcttcttcctccaggaagcctgcctgggccacctgcagtcagcttatccatccccaggctccaggcattacctgtccatgcattcatcccaccttttcttcttgggtggttttgtgtgtgcgtgtgtgtgtgtatgtgtgtatatcctgcccaactaacctgcaggctccttgactctggagccctgatgtcttctgtttctctgtctcttccatcatgctggcactggacgcaggatcattcctgactgattaatctctagcttgtgtccaggctgcagcttgctccgatgagcagttggaggcctagtgtaatgcttggtgaatatatataaggcatggactgaaaatgttgcttattttggtatagtagcaaaggattgggttaccttgaattgagtcttgtttggtgtaaccatgtaaataaacagtgtaaaatataggctattggaatggaagcccagacatctgttatgaattctatatataaatattggatatgcttacatgggttaaaatgagattgttggcacttgggttttcaaactcctgattctgctccgggtaggactgatcacgggtcctgggactcaaggcaggaggggccacgagctggcctttctctgacactgacttgccagaagtgggcgttcctgggagtggcagacatgcacccactagagatagatctgaatcaccccctcacattctcctaatagtgccaagaacccacagcagagtgcggggtgtactgagtttgtgctgagcaggggtgcctgaatcccggattgaagaaagtgttctacgcccgattaaaccaactgggaatccaggcaaaagaagacgttcccaggggaagccagcctgcccagtgtgcatggtgccttttaaacaaattatctgcattcccattgggatgaagttcacttgacaacattactcattggtttttttgcttttgtttagtttttttttttttttttttttttttgagacagaatctcactctgtcacccaggctggagtataatggtgcaatgtcggctcactgcaacctccgcttcctgggttcaagcgattctcctgcctcagcctcccgagtagctgggattacaggcatgtgccaccacacctggctaatttctgtatttttagtagagatggggtttcaccgtgttgcccaggctgctctcaaactcctgacctcagatgatctgcctgccttggcttcccaaagtgttggcattacaggtgtaagacaccgcgtcgggccttttttgtttttgtttttttgagacagagtctccttctgtcacacaggctggagcgcagtggcacaatctcagctcaccgcaacctccacctcccgggttcaagtggttctcctgcctcagtatcccaagtagagctgggattacagggacccacccgccaccacacctggctaattttttcttttttttccgaaacggaattttggtctgtcgcccaggctggagtgcagtggtgcaatctcagctcactgcaacctctgtttcccaggttcaagggattctcttgcctcagcctccggagtagctggtattacaggcgccctccaccatgcccagctaatttgtgtatttttagtagagatggggtttcaccgtgttggccaggctggtctcgaactccttacctcgtgatccgcccgcctcagcctcccaaagtcctgggattacaggcgtgagccaccatacctggccataatattcgtttttatgcatcattcctttttatggcccctctcacctccgtcaggtggtgaatagactacgtttcatttatccgttcatcggttatggacatttgagctgtttccatgttttggctttgtgaacactgctgttaacatgcgtgtacctgtatgtgtacatacatgagtagaggggttcagttcttttgggtatatatgtaggagtggaattactggtcataggatcattctatgtgtaactttttgaggcactaccaggctgttttccacagcagccagaggtgtctttaaaagcagttgtcaactgggcttggtggctcacacctgtaatcccagcactttgggatgccaaggcgggcggatcacctgaggtcaggagttcgagaccagcctgaccaacatggcaaaaccccgtctctactaaaaatacaaaattagctgggcgtggtggcgtgtgcctgtaatcccagctactcaggagactgaggtgggagaatcgcttgaaactgggaggccgaggttgcagtgagctgagattgcgccatcatactccagcctgggcaactagagtgaaactccgtctcaaaataaaaataaaaataaaaataaaaggaatgatcacttcctgtttcatgaatgaggaaactgaggctctgggagatgggaaatcctgcccggaatctcacagctggaggccaggccgggctttgaatccaggcaactgagtctgagtggatggtgtgtgctttgtgttggagctggcccagggctggatgaaggcaacatttaattaatgaaaaccactaccccctcccggctgttacctcttgagcgcttttctatgaagcatcctgtttaagcctcgcactctgtgatgtggaggtgcagtaattatccccatttcacagacaggatgttgaggtcagaggggttgagtgattgtcatgggccaggtctcagccaggcttgctaaccctggagtctgccgtctgctctgaagtggtcactctcagctggagagctgacctggcccttttgcctttgtgatgtacggtcctgaaaaaaatatttgcagaaatagcttcataggaacatatatggaatttggaattaaaaaatatattaaaaactatatatttaccagtattacaatatattacccagagacttgtctccctaatgaggccacctttactttttcaatctttgtctccgctggtgctttctcataactgccattcattctagtagaaatcatggttcacggttatgctgggtgtgtggtttttggtgttgacatgtcgaacgttttgttgttaccgcagtcattttgttactagttaattggtgctacctttccacggagacaatagtctagttacccctgccgctggagattgttcttttttttttttttttttttttttttttttttgctattacaaataaggcctcagcaaatattgtgactcagacgttttccttctttctggtgtttcttgggacagactcctgcaggggtgatccctggggagagggcgtaattattttatgttcatgatgcggcagtcaccaccgtgtttctgaaaggtttgttctgcactctgggctgccagttgacattcggtttttcatggtgatctggtgggtcctggggtgtgatggtggccgggcccagctgcttcagccctcagcctgtccatcccccacccacacccagaactgaggctccaaggtgcagcctcaggtgtctgccaccctgtgcatccctcatcgccccaggtctgttgccctcccttctcctccttctcaaattacgctgcccagaggtcaggctagaggtcagcaggtccatcactggatggaatgacctggggcaggccaaggtatctgggggctgtgtagctgtgacccctgagcttcagggggctgtgaaacgagagaccttgggcacatgggcacatgacgtggtgggaaggcgcccagaggaccagcacccgccatgctacccccacactctgctccagtgtgctcccaccccaggacctttgcccaggcctgccggctccttctttcccagcaaggcctgctctgtctcaggtagcatgcagccccccgacccacttctcatgtagcatgcagccccccgacccacttcaccctgcaccatttccctgatctgcagcgtttatgatgtaacattactaaggtgtccttattggctatgtgtattgcttgtttattaccacccacgtgaatacggagccattcaggccgtgtcctgggtgtctgggtgggccagctggtgctgggcactcgcctgctggaggagtgagtgcccatggccagcccctcctggtgcctgggctgcgtctcctccttagtgtgctgcctctacaggcttttctcctgaactgtcctctttgcttttttttttttttttaagctttaaaagaagtttttgtagagatgcggtcttgctgtgttgcccaggctggtcttgaactcctggcctgagatgatcctctctcctcggaaagtgctgggattataggtgtgagctacggagccggcccttcccttctactctgctactctgctgttctctctccctcccgtcgggttctgctcctgccacgttctcccctctccccaccaaaggctgggttttctttgtcagggctcctttcccctttggagaagagggggctgtagggccttggtgcgaggccctccagtgacaggatcccccatcacccagagttccacaggccctggtagggaggagggggagcagaagaggaggtgccatctttgcctgctggggaagggcaggggccacccacacagagctctcccatttgctgtggaccctggggccactgccagttccttccaaaggaaagccagctccccaggtggtgggagagtgatgtggcttcctcttaaacttaggaattgagtgtgtggttgcttctaagtgccttagaagccggagcggctcctggaaagagcctgcctgccacagcgggccttaccctggctgtgcccacagatgtccctggggcctgccgctcctgcccggctctcctggcctcccccggtgtgggttgggaaaagcacagcaaattaaaaaacacctccatctctggcctttgaagaatgcatctgaacagccgagagtgtaaaccgtggtgaaatgtggtctttccagtttggggagaagcagggcagagctggggcttttgtacccagggtttccaagagctcctgcctccctcggctgggctggccagggccccccgctgggacctccagctgtaatagggaaggttttactgggttgctggccactgtggactgcccctaagggcaggtatgcctgcctttacccgggttcccctcctgcctggaagatacagcccatgggaggcctgttgtctgtgggatcctccagcatcagagacactggggccagcgtctgcctggtgaggtgcaggcctggcaggcccggtcccccacctgcttgagcacccacggtggtgggggctcgctgcctcccgagacaatctatgtcattgttgtccaaggaagctaatttagagtagaaagttccgtgtccagtcccactctgtgcgtgtgttagcaggggactctcgggccggagctgggtccaccctggtagggggacttcatggggcctgggcgacagcactgtgtatttgtgtgtgtgtgtgtttgtgtgtgtgtgtgtctgaggaggtggaccagtttctcaaaaggcctgtgaccccaagaaccaaggaatttcagcctgggtggatcacaccttcactggtgagtgggacaagctgggggccctcgccacaggagcagccagggcatggggcacagttggcctcattcacaaaatgggagtataagtgatccctgctctggcggccaggacgatgagtgggaacacaccgtgtgggggctgcctggcctgggtgtgccgcgggtgtccttgttggtgatggttccacctgcttgtgccaccagtgccctctgggtctcacacacaactctcttcccagcgaaggcccctcctgccctcaggcctcagtgctgcttccgtctcggaaggccccaggagctcctgcatcctgggcgtgattcctgtgtgcctgcagaccccctcgcggctgccatctcatcctttggtgcacctgttggccagacctcctggtagcgggtgctgcactcccctgaatgtgccggggcctgggggcagggacctgggctcctccctcactgagtggagggaactcagtgtcttggagttggggtgcctgcaggctgggtggtgcaggtgaaatgcagacctctcagctggtgttccagagcagctgccttcccccgcccgagggacttcacccgcagcccagtcaggggtggcgcctgggtgcatcgcccgcaggctgggtaggggtggagcctgggtggccctgcctgtgagctgcatagttgtcgcctttgaccctgagttttcttcgttatctgtttggacctgtttggggcaggcaggggatgagatctgaagataaatgccttagctgtgaccatctccttttgtgagaggtcaatgtccagttccgctgcagttataacatcccattttttgatttctttttattttttcctttttctttttgagatggagtctcgctctgtcacccaggctggagtgcaatggggtgacctcagctcactgcaacctccacttctcgggttcaagtgattctcctgcctcagcctcctgactagcaggggttacaggcgtgagccaccacgcccagctaatttttgtatttttagtagaggcaaggtttcgtcatgttggccaggctggtctcaaactcctggccttaagtgatctgcccgcctcggcctcccaaagtgctgagatgacaggtgtgagccaccgtgcccggcccagaactctttaattcccacctgaaacttgccgccttaagcaggtccccagtctccctcccctagtccctggtcccaccattctgctttctgtctcaatgaatttgcctaccgtaagtacctcatataaattgaatcataaagtatttgtctttttatatctggcttatttcacttagcataacattcttaagtttcatccatgttgtagcatgtgtcagaatctctctctttttttttttttttttttttttttttttgcagacagagtctcgctctgtcatctagactggagttcagtggcacgatctcggttcactgcaacatctgcctcctgggtccaagcaattctcctgcctcagcctccttagcagctggaactacaggcgcgtgccaccatgccttgctaatttttgtattttttgtggaggcagggtttcaccatcttggccaggctggtcttgaattcctgacttcaggtgatccacccgcctcagcctccccaagtgctgggattacaggcatgagccaccgtgcctgaccagaatctttttcctttttgagactgaatagtactccattgtgtggatggagcagattttgccccgctattcatccctcagtagagggacgcttgggttgcttccatgtttgtttgtttttttgtttttgttttgctgttttttgagacagagtctcgctgtgtcacccaggctggaatgcagtggcgcaatcttggctcactgcaacctccacctccagggttcaagtgattctcctgcctcagacttgtgagtagctgggattacaggtgcccgtcactacgcccagctaatttttgtattttagtagagacggggtttcaccatgttggccaggctggtctcgaactcctgacctcaggtgatccacccgcctcagcctcccaaagtgctgggattacaggcgtgagccaccatgcctggctgcctccatgttttagctgttgggaaggatgctgctgtgatccaaggtgtatgcatatctgattgtgtccctgttttcagttcttttgggtatataacccaaagcgaaattgctgggtcatatggtaattctgtgtttaagtttttggggaactgccatgctgttttccatagtagctgcaccatttcacatttttgccagtggtgcacaagggttccagttgctccagatcctcaccaacacttgctattttgtttttttgatagtagccgtcctaattggtgcaagatggtatcttattgtagttttgatttgcatttccctgatgattagggatatattaagcctgttttgatgtgtttattggccatttatatgtcatctttggagaaatgtctgttcaagttgtttgcccatttttgagttggcttagttgttttctcattgttgagttttaggagttctctgtatttcatggatattaatctcttagtagatctatgatttggaaatattttctctcattctgtgggttgcctttttactctctcgatagtgtcttttgatgcacaaaatctttagcttcccatgaagtcccgtttgtctttatttgtggcctatgccttcctgttgtttgactttcacagtgtccctcgttgccacaaagaactgtagacctaagatgatgacagcacgggtggggcggcggaggcgccgctgtcattttcctggcctcaggtcctctgtgtgtcctcccatcctgtggagcatgtctcctgggaatgggaggggccaggatttgagccagtgcttgtcttggcagggaggcctgtgctcggaaccatctaccccactgcgctggggtctcctgggccatgctctggccctttgtgttcccagctaccctcatagaggctgcaaatctttcccctgctgaaatgaaaccaactgaactaactacaggattcagttctgtgattgtcattggctgagttgagtttgttttggctttctctttcttggtgaaggtgggagtgtggggttggctgggctcccccatctgcgcaggaggacccaggggtctgcagttttcatgaggaatgtcagctgtttcaagccaaggcttcagatgttttttgggggtgtttgtggccagcccagcctagccctgctgacagcagacacggactgatggagctccctggaggcccttaacctcctcctgtccacatcttgtgttcactcctcatgtggcttcttagtccctctgagtctgtgttgggggttgctggaccctcctggtccgacgtctgaggtgtctggtggggtgatggtctgaaggcctctcctgatttctcattgagcccgttgtgggaatgagaccgttgtctgtgagatgaggcttcttgcacaggcagaaggggctgagggctgcggtgcagagggaggtgagggagccagcctggccgcaggcagatcaggaatgcttggggtggggtggtggagagaagtgtaggtgaggccagaggccaaggccttggaggccaggctagggggtctgaccttgttctgcatggcactggcacagggagctgtggaaggtgtctgagccaaggggtggcattccagagtgaccctttaaatgtaggaatgtccagaagcagggtgggagaaacatggaatacaggggtggatgggaagctgatgccacggccaaggaaacgggcctgagcttggacagtggtcaaagacttgtaagggaatcttgaggctctgtctggcctgggctctgaacccctcaaaaaatgtggccctgtggctgggtctgtagcgagcagcatggccagtgctgtgcctgcatgtccccgtcccctgtgtcaggccaacaaaggggatgtggcttctctgcagaacaggacagggcccctgtagcctctggaggacgatgtgggaggttttgggcatggcaggaagggtcacccatatctgggggaacagacgtaacagttggtaaacaaacaggtgctgtcaccgaatgtgggaagaaggctgtttgctgcgctgcaggagcctctgaatgatgcgggccggggctgcccaggcaacttcctgacaacgccttaggggtgggaggaaggaactggaggtcttgggcatgggcagggcagtaccaggagtgctctgggcatagtgctccatcccagggctgtgtatcttgctggcttagccagtggccctcacggtttgcttctgccccacagcctcgccgctcctgctatttgccaaccgccgggacgtacggctggtggacgccggcggagtcaagctggagtccaccatcgtggtcagcggcctggaggatgcggccgcagtggacttccagttttccaagggagccgtgtactggacagacgtgagcgaggaggccatcaagcagacctacctgaaccagacgggggccgccgtgcagaacgtggtcatctccggcctggtctctcccgacggcctcgcctgcgactgggtgggcaagaagctgtactggacggactcagagaccaaccgcatcgaggtggccaacctcaatggcacatcccggaaggtgctcttctggcaggaccttgaccagccgagggccatcgccttggaccccgctcacgggtaaaccctgctgcgactccacctgggtccagggggcggggagtgtcaccatctctctctcgaatttgcatgagcccaagttgtttttcagaaaaagggtgtgactctgaaaatgaacccgtgggggggttggctcaggcctgtaaccccagcactcggtgtgactctgaaaatgaacccgtgggggtgttggctcaggcctgtaaccccagcactcggtgtcactcttaaaatgaacccgtgggggggttggctcaggcctgtaaccccagcactcggtgcgactctgaaaatgaactcgtgggggggttggttcaggcctgtaaccccagcactcggtgtcactcttaaaatgaacccgtgggggggttggctcaggcctgtaaccccagcactcggtgcgactctgaaaatgaacccgtgggggtgttggctcaggcctgtaatcccagcactctgggaggccaaggcgggcagatcacctgagtccaggaattcaagaccacactgggcaacatggtgagaccccatttctacaaagtatacaaaaatgaatcgggtgtgatggtatgcacctgtaatcccagcttcttgggaggctgaggtaggaggatcatttgagcctgggagatcgaggctgcagtgagctgtgatcccaccactgcactccagcctgggcgacaaagtgaggagatcctgtctcaaaaaaaaaaaagagctcagctttcaagatttgttattgttgaaggaattacttccccttgagattccatagttatgttccttttttttttttttttttttaattgagatggagtctcccttgttgcccaggctggagtgcagtggcacaatctcggctcactgcaaccttcgcctcccgggttcaagtgattctcctgcctcagcttcccaagtagctgggattacaggcgcccaccaccacgcccagctaatttttgtagttttggtacagatggggtttcaccatggtgtctaggctggtctcgaactcctgacctcaggtgatccacccacctcggcctcccaaagtgctgggattacagacgtgaaccaccgtgcctggcccatagttatgttcctttttaaaacttgcatgtctgaggcaaccgatgtggttggccatgggtttgaatggttaaacacatctttgctgtgtgtatggtgggcggcctgggaagtgcggacgctcaggcaggtggaatttgcaccttctcctggctttctaattgcattggctgaaaaagtgcagctccttgtctggaagcagaacctgctgggagtggttctcgggtccgttctggaagctgccctgtgtcctcctcagctcctagtctggctgagttcacctgggcccttgaaggctcagggcctggccgtgatcccaggtggggagagcgtgggtggcaggaaagctttggagtcgaagtccggggtggagagtttaaggggaggtggcccagctccactggccagctaggccaggtcaccccagactcccgagcagagggaacagtttgcttggccaccccttgtccctcctttgtcccttttcttgcagcctgggagtgactctgggggccgtacacacacccttacctgggctgtgctaagccctggcccttgctgacctgtcaggttctgtgctgggtcagtgtcagaactggttggcagaggtcttgactagaacacaagagccatttcccaccacccccaggctcagttggaagccctttgcctgttagttcattcagtgtcaccacagtctctcagcactcccagcctggacctcaccggttgaggggccggcctagatcttctttgcgcaatggcacgatctcagctcactgcaacctccacctcccgagttcaagtgattctcctgcctcagcctcctgagtagctgtgattacaggcgtgcactaccacacctggctaggttttgtatttttagtagacacagggtttcgccatgttggccaggctggtctcaaactcctaacctcaagtgatccaccctcctcggcctcccaaagtgttgggattgcaggcgtgagccactgcacccagcctgacctagatcttctaggttagaaagtcccaggagtgggcggccatgcatccaggcctgccacaggagcccgcctgccctcctccctgaagtcagggctctggaagcccttcccttggccatgccctgtgggacagtgtccaagctctggagtaggactgaagacccctgggctctagtcctggggccaccaacttgctgttgccctttgcagtgacctccccctgactcccatggtgccggctgcaggagccgggcgggaggggctggttgccagatcctgcagatgcccctcctctgggcctgcccagggtagtgggaatgagggtgtggggtgagggtctgtcctcaccaaggctggtgtttgggagctcaggaagcagagtgccatgtggccaagttcacctctttgatctgtgtggtgacttaggaagccattgactggcttctgacgagcatgggaagggctggagcctttcagagcccaacaggtttgtgtgagagccaggcgtgtgtgtgtctgagcaactgagtgtgggagtgggaggatgtgagcgtgtgtgtgtgtgtgtgcgtgtgcacgcatatgcgtgcatacgtgtgagcctgtgtgtgtccgtgtgtgtgcatgcatgcgtgtgagtggatatttgtgtgtgtatgagtgtgcgcatgtgactgtgtgtgcacgtgtatgtgcccgtgtgagcgagtatgtgcgcgagagtgtctgcatctgaaccagtctgtgtgtaagtatggggtaccagcaggggtgggacacggtggaatttatcgccaaagtattttgagtccctgaggtcaggccagagcagcctcgtgcccccactacctgagaagtgcccccggcctcccaggggtgctgtgctgggcaaccactcatccctggagcccctcgtatgccctcgctgccctccgagtgggctagccacccctgcagctgccggggagccagctgacctccggggcagcctctgttccgcttggtgaactgttgccctctcagccctctccccctgcactgtggctccaggagtcgcggggttactgaccttctttttggaagggtcggctggtgtagcagtgtctctggctaggagggggcatctgcagtagtcggagaggctgaagatagcagcttgctagaagccctctcccagggccggcctgcggttgctcaccagcggctgccatggccatcgtgtcgccaggacctgcgctcctcctgtcattgcgttccctcccagcgtgggtcgctgcagctccctcacctcccaaccaggcatccactgcatttgtgagcccttgcgcctggtcctgctccccacgcagcgggtatagcccagtctctggccctttcagtgagtgggaggagatggtaaatgaatagtatttgaaagggacgtgtgcgtagggggataaagcagtgcttgggtgctgtggcgaggggcttccgtcggagctcaggtgctgggaaggcctcttggtgacttttgagtcgagactggaagcagatgaggctgagaaccgtgtggctgtctgggggcagcgcggtccaggcagagggatcagccagtgcaaaggccctgggctggtttggggcggggcctgtttgaggggctgtagcagaatgtagggaaacagggcccaaggtgtgaggagaggacacatgaggtctcgagcagaggaggtgccagctctgactcgtgctggaaggcatcccctggtggctggagcgagagtgagctgtggggtgggtggcgtgggggcaggagccctctccacggttattaccgggatcctggcgacagaaagcagcagcggggacacctcacttgtgggggtaaggagtggcgagatttgggatctgttctgaagagaaaagacagctggatttgctggcactctgcatgtaggttcgataaaaagatgagacaaggttggcacggtgccactctgtgcctcagtatccttgtctgtacagaggcgtgaccatgctgcatgtcatgaggaaaacaccaagaacagtttgtgagttcaacaaatgttagctgtcgttataataaaaatgccctttcctcgccaccagaagtccagtctccatgcctacgtggttttgtctttttacttctttatggcttttgctatgttggttgggaagtgctcagtgctaggttgggaggtgatcagtcgggaggtgctaggtgatttgttgggaggtgcatgatgctcagttgggaggtgctaggtgctcggttggaaggtgattggtactttgttaggaggtgcttggcgcttggttgggagttgttggtgtccagttgagaggtgctaggtgcttggttgggaggtatttgattgggaggtgcttggcacttggttgggaggtgctctgcacttggttgggaggtgctcggtgctaggttgggaggtgatcagttgggaggtgctagatgctctgttgggaggtgcatgatgctcagttgggaggtgctaggcgcttggttgggaggtaattggtacttggttgggaggtgcttggcacttggttgggaggtacttggtgcctggttgggagtagttggtgtccagttgagaggtgctaggtgcttggttgggaggtatttgattgggaggtgcttggcatttggttgggaggtacttggtgcttggttgggagatgctgggcccttggttgggagtagtctttcccatgctcagatctgagctggctttgcctgcatcatctctgcgagccaactgtccctgtttggctctggcttttcttaactatttgaaatggttcctttacatgcttgcctctgaattctctcccagaagccctccccaggatcacacctgtggctgttcactcccacccctgcccctggggcaaagttgaccttagtgttgattcctgggcctctccccacaccttccctttgctccagtcatttgaatgagagagtgaaaacagtgagatgccggctcccactcatcagatccagtgatgctgatgacgccagccatggtcctaccctgaggtgctgactctgtccctgtaggctccatgtctccggagagggagagggagagggagaggattccagcctgtcacagcgcccgcggcagcaacccctgctcgccaaatactgacttgaatagtggtcctcaggcataagtgtgggcgctgagtcctggggcaggactgctgtcctgagagtggggacagtggagggtgggtttgtcctctgtcctggccacaggcacacggttgcgaggagcatcttggccttcctcccggccctgctagagcccccgtcatctcctgtgccctcctgcagtgctgtcccccaccagggtccttcctcagaggagggggttcctgccccggccatcatcaggaagggggtctctgggtccgagcgtccacctcagtgtgcacgtggccaaaaggatcaagagccctgcagccaggggggcccctcctgagactcgacttcgttgcagtttcagcaatgcaggtggccccgtgcggacatccaggcagggttgagggaaggcacatccctcccaggcccagggtacccatgtgggtggcagagcgggctctggggatgaccctctggcccctgaggatctggggccagaaagacactggcttagcatgggaggagtccccggcctgtaccagcctgacaaggggctgcagtggcccccgggtctcaaattaaagccagggtgaaacccaaccccctctttaaaatgcaaaatggcccttccctaaaataacacacaaccacaaccgcagctggctctgcacgaaggccatgctgcagctcttttcttcggaagtcgattttcctccgtggaatttggctgggcttgtggtagcgtttgagactctgcaagagcacgtccacgccaaccagtctctggtcaccgactggctcgcaaattccccatttaaggaaaccagcaggcctctgttatgaaactcggggaaggaatgtgaattatgctccatgcggaggctcctgctcctgcacgttttccagccttttccatgggccacggtggagcatttggggaaggcctgtgtggattcccccccaagtccagactgatgcccctgataccttctcaggaggtggcggagggtctgggctctgtccaggctcctaggggtggggacgtgcaggtaaagcaaggcgtctgccgcaggcacgcgggagccttccctgggctggctgccagcaccttggagtcccaggctgccaggaaaagttcacccacacccgggctttgctggcgaagggtgagtcatatgatggccgggctcgggccctcagcagacaccaagtgtgttcccagagcagccgctcagcgcctgtaacctggaacaggccagcctttcggggcctcagttttctcatctgcctaatgggaatagcaattcccaccttccctttgttggttgggttctcactagatgcacaggagacagcagcttgagagggactgtttggagagctgttccatgtgacacccctcttaccctgtccccacggggccggaggagcaggggcttggtgatagcagctgggcgcagtcagcctctgcagggaagagggcatgtttggttcgaggctcctatgccctcattcttgttgatcttgtcacagcccctctggaaggtggagatggtactcgctcaggaacgataccactcaaggaagcatggccccctggatggggtggcccttggtgcacctgaggctcctgaggctgcagagcaccatggtgggggaggaggcggctgtgtgtctgtcatttgcctcttctgctgaatggagacccccagagggcaaagcggggcttgttctccctgtgtcccgggatcactctcatgcctggcttgggcgagctgcctgtttctaaatcacttgctaaggctgaggggaatggggtttgccgcccaccccaggaagaagggagcaagggagtcagcaccattttacaaggaccaagagtgggaggaggctcctcagaggacattctgggcactgtcccctttctctgctgtgaagggtggacaaaacacaataggtctgccagcccttgtgtcctgtggctcatcccagctggctgggatgggaactgagtcctccaagctggtgtggttcccctctggtctccgctgagagtcacgcccagcctctgggcacacaccctgtggtcacctccaaacagggcacactgggcactggtgggggtgggacctgccatcccagacctggtgtctgctcactttgtcttggttcattggccagagatcacgtaagggcgccctgaggatgtgcttgtttctcatggatgggtgatgcttgtctcttgggaacatggagaagcaaagccacgtcgcccacagacctacccaggaacagctgcagctgcaggttcagggtccatcccagccatgggttttattcttttttttttgagacggagtgttgctgtctcccaggctgagagtgcagtggtgtgatcttggctcactgcaagctccgcctcccgggttcacgccattctcctgcctcagcctcccgagtagctgtgactacaggtgtccgccaccatgcccggctaatttttttttttgtacttttagtagagacggggtttcaccgtgttagccaggatggtctcgatctcctgacctcgtgatccgcccatctcggcctcccaaagcgctggaattacaggcatgagccaccgcacccagcctttttttttttttttttaggcagggtctcactctgtcatccaggctggagtgcagtggtacagtcacagctcactgcagcctcgacctcccagggctgaagggatcctcccacgtcagcctcccaagtagctgggactacaagagtgtgccaccatgcccagctaacttttttttaatttttattttttgtagaggtgggattttgccatgttgcccagggtggctcaagtgacccacccacctcagcctcccgaagtactggaattacaggtgcaagccatcgtgcctggccatgttttgttgtttttaaatagacttaattttttcaaacagttgtaggttcacagcaaaattgatgagcagcaggtactgagttcctatacatccctgtcctcacacccacacagccttcccaactgtcagcatcctgtgcagggtggtacatttgttacaactgatgaaagctggctgacgcaccatcacccaaaatccacgtttacacgagggttcgcccttgatttgtacattcttggtttagacagatgagtaaggacatgcacccaccattccatgtcatacaggatagttccactgccctgattttctgtgctccactcattcatccctctcctctccaactcctggcaaccactgatgctttactgtctctgtgtatttgctttttccagagtgtttagaactggactcatacagattggctctttcacctactaacatgcatttaagtttcctccatgtcttttcatggcttgatagatcatttcttttcttttcttttttttttttttgagatggagtctcgctctgtcgcccaggatggagtgcaatggtgcgatttctgctcactgcaacctccccctcccgggttcaaatgattctcctgcctcagcctcctaagtagctgggactacaggtgctcactaccacgcctggctaatgttttgtatttttagtagggacggggtttcactgtgttagccaggatggtcttgatctcccgacctcgtgatccacccgccttggcctcccaaagtgctgggattagaggtgtgagccactgggcccagccgatagctcatttctttataccactaaataatattccatcctgagtgttttgaattgccttttagaggttcatttacagcattttcatggtagcaaaaaaatcagaaataacctgaagttctttaaaaaacttacagcagagtacactaggcaatcatcaaaagaacaaggaatctttctatccacaagaagggaaggtgcccagaatttactgttaactgagaacaagttggaaatagtatattttgattgcccagcttaaggcaggaatacctgaaaccatacctgttggttatttccgatgggtgagattttagggcaagttcactgtctgttgtttcatgtctgcatctatgcagacaaaaacaaaaaacagatctgtgttagctgcttctcttgccctgcccccgtcacaggtacatgtactggacagactggggtgagacgccccggattgagcgggcagggatggatggcagcacccggaagatcattgtggactcggacatttactggcccaatggactgaccatcgacctggaggagcagaagctctactgggctgacgccaagctcagcttcatccaccgtgccaacctggacggctcgttccggtaggtacccacgcagtcctggggcacccctttcccctttgtccccagggcttttgaaggcgttccttcttaactcaggcctacagactcttctctgaaactctggggccctgaggaatgcaggacttctcagaacttggaacagcgtcagggtctgtgtggcatttgccaccagcccttgaatatttctatagcaaatgtggcacgttcattctaagtagggcagaaaagactatctgtagcccacacccatgcacagtttttttttttttaactttgtttttttgagacagagtctcactctttcacccaggctggagtgcaatgtcataatctcagctcactgcagcccccacctcccaggctcaagcgatcctcccgcctcagcctcccgagtagctgggactacaggagtgcgccaccacacctggctaatttttgtatttttggtagagacggggtctcacatgttgctcaggctggtctcaaactcctaagctcaagggatccttcccctcggctcccagagtgctgggattacaggcgtgagccaccgcacccggcccatgcaccaaatgaggttttgtcaccagatgagcaacaaaagctttccatcttcagagcgttttggattttggaattgttggggagggcttatggcccggcagggttgtgaacagtaaccctgtcacacgcaccacccccaccctggccctatcccagctcaggcatcctgagggcaacagccggaagctgtctcagttattggtgcattccccagtctcaccagggggccttccacatggtcagtgctcaataaaatgggccgagaatgagtaggaagggttttcccctcgttggttaattgcttttagagccttctggtcagcatagcttcccagctctgtacttaattaccccttatagaaacatcccttctgtgtacaggtgaagggcagtttattcactaaccaagtgctgcctgctgctagccctgtgctaggtgtcagggatcctcctgggacggcagaccccattcctgcactagtggagctcctggcccaggcagggatgtggcaggtgtctgtgcagagggcagtagtgactgcatgggaggactcagtggctggatttctgcaaacacaggccaacacccacatgaacagacttgagggcttgggcagctttgctccacacttgccaggcctcgtgtgttagttatccattgctgtgtaacaaaacagcccacaacttaacagcctgaaacagcaaacaggttttttatggggagggagtcagtgatgaggagtggattagctgggtgcttctggctcagggtatgacctgagggtacactcaagctcctggctgggcctcagtcatctgaaggtttgagtgaggccgggacatccacttccaagctcattctcagggcaagaggcctcagtttctcctgttcctcttatgctgagccacacatctcttttgggctggtttgaaaatatcctgttgtccctggaagtgcagaccagcgggtctggtttgagatttggaaatgtggttaccctgtagactgtggttcttgggagctgagtgatcttacagttatgaagggtggacaagaggatagaaaggctgcagctgggagtgccctggtcaaaggatggtgacaggggacagtgagggtgatggaggttgaaacatgctaatggtggtggcggtggcggcagcgaatccttccatagcacttactgttttccagggacgtttatcagttcatttaatgctcataccacctctatgaaacgtttgctattatgttttatttttatttatatttttattgttttgaggcagggtctcactttgtcacccaggctggagtgcattggcacaatcatggttcactgcagccttgacctctttttttgtttgtttgtttgttttttttttttttgggatggagtcttgctctgtccccctggctggagtgcagcggcaccatcttggctaactacaacctccacctcccaggttctagcgattctcctgcctcagcctcccaagtagctgggattacaggtgcccgccaccacgcctggcaaattgttgtatttttttagtagggacggggtttcaccatgttggccaggctggtcttgaactcctgatcacaagtgatccacccacctgagcctctcaaagtgctgggattacaggcgtgagccaccacacgcggccacagccttgacttcttgggctcaagtgttcctcccgcctcagccttccaagtagctgagaccacaggcacgtaccaccacgcctggctaatttatttggtattttttttgtagagacgaggtttcaccatgttgcccaggctggtctcaaactcctgagcttaagccatgtgtccacctcggcctctcaaagcactgggattataggtgtgaaccactgtgcctagcctgtgtttgctattttgatcccctgtgcacagagaagcatgtgaatttgcccagagccacacagctagtcccagccagggttggaacatagggtctgtagctccagggtctggtctgttctcagcctctctcccacctgcttccccgcgggattcttctgcctctgcagcggccatcgctcttcatgatgcacctggggctattcacatggaagcgtcgtgtgttgggtgacgagctctggagccacacagacctgtgcaggcccctttatctgtgactgtggctggggcaagggccgaggctgaccttccctcagtgcttctggctgaggcagagcatggcccagggagcaaccgagagtgatgggcctctggcttctctcactgaaaaatggccacatgggctgggcgccatggcttacgcgtgtaatcccagcactttgggaggccgaggcgggcggattacgaggtcaggagatcgagaccatcctggctaacacggtgaaacctcgtctctactaaaaatacaaaacattagccaggtgtggtggtgggtgcctgtagtcccagctactcgggaggctgaggcaggagaatggcgtgaacctgggaggcggagcttgcagtgagctgagatcccgccactgcactccagcctgggcgacagagcaagactctatctcaaaaaaaaaaaaaaaaaaaaaaaaaaggctgggcgcggtggctcacgcctgtaatcccagcactttgggaggctgagacgggcggatcacgaggtcaggagattgagatcatcctggctaacacagtgaaaccctgtctctactaaaaatacaaaaaattagccgggcatcgtggtgggcacctgtagtcccagctactcgggaggctgaggcaggagaatggcgtgaacctgggaggtggagcttgcagtgagctgagatcccgccactgcactccagcctgggctacagagcgagactctgtctcaaaaaaaaaaataataaaataaaataataaaattaaaaaattaaaagtaaggccgggcgtggtggctcacgcctgtaatcccagaactttgggaggccaaggcaggtggatcatgaagttaggagatcgagaccatcctgggtaacacggtgaaaccccatctctactaaaaatacaaaaaaattagccaggcgtggtggccggtgactatagtcccagccactcgggaggctgaggcaggagaatggtgtgaacccgggaggcagagcttgcagtgagctgagatggcaccactgcactccagcctgggcgacagagcgagactctgtctcaaaaaaacaaaaacaaaaaaaaataaaattagaaaattagctggccatggtggtacatacctgtgttcccagctactcaggaggctgaggcaggaggatggattgagcttaggagattgaggctgcagtgagccatgatcacaccaccgcactccagcctgggtgacagagcaagaccctgtctcagaaaacaaacaaaaaagacaacattgtggaaaacagtttgttgattccttgagacgtaaacattgatttacgtatgacccagcaattccgctcctagctgtatactcttaagaatcgaaaacaggtcttcacacaaaatgtgaatggacagtaatgtccgtagcagcactgtgcacaacagccgagggtggaaatgacacaaaggtcccccagtgggtgaatggatgcacagattgggttctgtctgcacactggaatatggttcacccctaaaacgggatgaagcactgacatgctacagcctggatgaacctcgaaaacatggtgccaagtcaaagaagacagacatcagaggctgtatattgtgattccgtttatatgagatgttgagaatgtgtgtagttaagtccatcaaaagtgtttgccggggctgggggcggggactggggagtgactgctgccgggtgtggggtttgcctgtggggcaatggaagtgctttggaactagacagaagtggaggctgcaccgccttgcgaatgcactaggtaacactattcactttaaagtggtaaatttaggctgggtgcagtggcttatgcctgtaatcccagcactttgagaggccaaggcgggtggatcgcctgagctcagggcttcaagaccagccttgggcaacatggcgaaaccctgtctctaccaaaaagataccccccaaaaattagctgggtgtggtggtgcacgcctgtggtcccagctactctggaggcggaggtgggagaatcgcttgaacctgggaggcagaggttgcagtgagctgagatcacaccactgcactccaacctgggtgacagagtgagaccccatctccaaaaaaaaaaaaaaaagtaaacgtatgtcctgtgaattttacttcaataattttcttaaaaaacagcatcaacaaaaatgaacagaagaggtggtggatctgcagagcccacagctcccatcttccctgtgccacttcatgagtgtcaccctctcctggcaactgtgctgagggctggggacgtggcggggaccctctgcccccaggcccaccctcagggagcctgtcacggggcgagggtcattaagcaaataaaactgcacattaccgaccacgtcacattatgatcctgtttccagtgtccataatctcattacacccgagtcctcatttgctgggcactgtaagcatctagaaaagaatagctgtttctcgggttgatgccaagtttcatttactctgaaagtataaattatgagcattgtaagaaggagcgagtgcacatggcctgatttgtatacagaggttaaagcgttgggcaggagaggtgtgctttttgccaggcatggcttcctcctttcttccctgggggagactttgccacttgacctgggggagcccgtgtgtcaccatcacaggctgtgtttgggaggtgccctgtgcacgccgggagaaatgtacgagggcgccagctcctggggctcttgacctggcctcacttgtctggttgaaagcaaatgggaagcctggcatggtggcgcacgcctgtaatcccagcgctttgagaggctgaggtgggtggatcacctgaggtcaggagttcgagaccagccttgccaacatgatgaaaccctgtctctactaaaaatacaaaaatcatctgggcgtagtggtgggcatcagtgatcccagctactcgggaggctgaggcaggataattgcttgaacccgggaggcggaggttgcagtgagctgagattacatcactgcactccagcctgggcgacagaccgagactccatctcaaaaaaaaaaaaagaaattaattgggtcagcagcaatgactgtcgggggaccctcctgatggctcctccaccccgcttccctgactgcaggcagaaggtggtggagggcagcctgacgcaccccttcgccctgacgctctccggggacactctgtactggacagactggcagacccgctccatccatgcctgcaacaagcgcactggggggaagaggaaggagatcctgagtgccctctactcacccatggacatccaggtgctgagccaggagcggcagcctttctgtgagtgccggctggggcgcgggggcgagggtgcgggggctggggggagcgggggcgcggggcaggggagtgggaggatgcgggggcgtgggggtgcgcgggcgtgggtggggtgggggggcaggtgacccctccctgcagaagcccatgctctggggggccccctctctaaaggggtacctgctgcaatggagggaggtatgtggctggctgggggacacgggcctgcagaggacccctctgcagagctcatgggggctatttcaggctcagcagtggcaaggggatttccaaggaaggttgcctcgttttcaaggcccagaagaagttgtctgtgtgtgtgtgtatatgtatttatatacacatacacgtatgtgtgtatatatatatatggttatttatatatacatatatatgtgtgtgtgtgtgtgtgtgtgtgtgtgtgtgtgtgtgtgtatgtatttttaatagagatgagagattttgccacgttgcccaggcttgtctcaaactcctgggctccagtgatcctcacaccttgacttcccaaagtgctggggtcacaggtatgagccaccatgcttggccctgcaagtcgcgtatttatcaatgaataatctgcccagaatcagcagttctcagcctgggggccacgctgggttgtgacagaggtccctgatggggaaatgcaccagcttctgtgacagtggggctgcggctctggggacagtggcccactcccacagggaccagggatggagatttctggccaggccattatggaaggtttggactttgaattgaaatgtggggcctaggggtgccagctgttcccagagcaggacacaggagggtggggctctctggagctgtttcctggtgagaaagtcgtggtcacaaaacccatctacacttggggcagcatgagggagggagaggttcattttgatgagtttgttgttccagttatatccgtattttggggctgctacacccagctttcccctggtttgaatgaggtgctggaagcatttatcgagttccgttcaattgctgttggtcatagaagggcttgggagagtgacaagcttggccatcccagcaagagggacagtgttcctatggaagctgctgggtccacacatagcacaaagacaagacaagccttttgcccaggagcccattgtctctggggttcccgtcactaccacacaggcaggtcctgaccccggccattggagcgtggggggcagcctttgcagaggggtgtcctttgggggctccgaggagctggggagggtgttctagtcataggagcttggtgggaggaagcagatggggaggatgtcactccatgggcaggtcacatctgggtgtgagggtggccaggaaggtcacggctggttttggggaaattgcaggccgtctggccaggctgagggccccatgtggacggggccagcgatgaggcaggtggaatggtgcccgcggggaggtccctgatgccacttgaggccgatgtttgggcagagggacacactggaggctgtcacgggggacgaggcaggatgtgactcattcagaaacaagtgacggtcctcttctggaaccttctctcactctgtcctggttttcccagtccacactcgctgtgaggaggacaatggcggctgctcccacctgtgcctgctgtccccaagcgagcctttctacacatgcgcctgccccacgggtgtgcagctgcaggacaacggcaggacgtgtaaggcaggtgaggcggtgggacgggacggggcgggcgggcggggcggggcctggcgggaatgggttgcggccgccgggggtgccccagaaggaacctcggcaaacccgttcgaaatgatccacttggcgggtgtggtgattcaagtctgtggtcccagctactcgggaagctgagttgggaggattgcttgagcccaggaggtcaatcctgttttgttttgttttatttttgccccagatattttccacttttttactctccgccttggtcctcaggcacttggtgcttcctgggactgtgttgcagtgaggcatggctcttctcctctggggcaccggctgaggatctttctttccaggtgtcggttcggggcgggcccttcgggaaatcacacacgttcaggatgcagctcgccttcggggatgctcccgggcctgggatagccagtctggcctctggggctgaccctggggcctggcaagcgagggggtaacgagaggtgtcaggaaagcgccatccctgggaccagtcctccccgtttctgtagcgtgatggggcccagcttgcagaaggtggtgggggacagggcctgcttcctgtgccggtgtcccactcgggagggcagggggcttccaagtgggctggcttccacactcaggaacagtcctaagggcagagtctcggtgtggggccccctagaaggactctcctggcatccggtggatggagaagtgtccttgctctcactgctgtctgagcacatgggggtcctgactttaggaacagtttcctggtccccctgttcttgctggctagggtctgtgtttgtgtgcagcggctggggtgtgtgtgtggtcgtggcgcccgtggcgtgtgggtcttttctctgctccctggcaggggtcctgcgtttggtgaggattttccaggtttgtatttgtctttctctttctgagagcagggcatctttaatgaagacatggctgttacatcaaagggtctgtccgctgtgccggctgctgcaggggatggttggagagcctccccgaccaagcatcttgtttcccaagtcgggagaaggagaatttgagaaatggggacttgggcggcctagtcctcacggctctggacagcaccccattcattcatctgcttgctcattcattcgttcatccatccatttgctcattcagcaggcatttgtcgaacacttgccgggtgctggcattgctccgaggcactggggaccccgcggtgcagacagaatcccgggcctctggcgctcgcactctgggctctggggctgggtgggtgggggagacggcacaagtgagtccacgagggagtcagtgcattagaaagggtgagtgtcttggacacccgctcctccatcacctctggggcccttcgctgttgaccgttcacctcggcctcaaaggcaatgttgagagagaaactggacccagggaaggagtccagatgagctgcctcctgagtgacctggcgacaccaggggtttggaccaagcaggttaagggaggattatagacccttgaaggggaggagtggtttgaccaggttggatgagccctttgtttacagaggaggccagggcaagtcaccagcctggggttgcccacagcaggtggcatagtaggttctagcaggtggggtctggctcccagagccatgagtttgctgctgccccatacctgggccctggtggagcaaggccctggtctccctcgcagactgccccaggacgctgcctgctccctggaggagggggtgcctcggctgcacaagcctcagcggagaaggatgcttggcttgctggctgcccgggaaccttggccttctcagagtttgttttctttcctgcctgtctgttggtgagaagaggctgaactcagtgctggagctggaccctgcgctctgcagtgttggttgaagtcctggcggaaagggaaagagtgaggacatacgggctcatgacggcagggagtggccaccacagtcagggccgggggacggaggggagagagaatcaccggaatatggcaaaggtgtaaaacaggcagctcgggccgggcgcagtggctcacgcctgtaatcccaacaatttgggagtccaaggcaggtggatcatttgaggtcaggagttcaagaccagcctggccaacatggtgaaactccatctctactaaaaatataaaaattagctgggcagtagtggcacgggcctgtaatcccagctacttgggagactgaggcaggagaattgcttgagcctaggaggcggaggttgcactgagccaagatcatgccgctatactccagcctgggcaacagagtgagaccctgtctcaaaaaaaaaaaaaaaaaaatgcagctcgtcctggctagtctgaaaaaggtggagcatatatgttgcccaatatccacaaatattccagaaaatatctgagaagaaagcagttaatgagacgggcctgttcccctgccccgaggcacacgtgtggtgggggccatgtcaggaagcaagccggcacacagatggacataggacagacctggatcgggtacggaacacagcaggggctgagccggagactcctgtactgggggtgtggccgcctgagccggcaggtcagaggtctctctcaggaggcctgagatctgaaggactaaaagagggaaaggcgagaaggaacagcacgtgcagcggctttgaggcaggagcatgctggtgttgggaccgacttcacgggctgtgtgacctgtgtagtcatatgaggtgagctctgttgttgacctgaaattcctaccttttgagtaaggggctgtctgcacttccattttgcagcggtccccgcaaattctgtaacgggcccggctcgtgtgtttgagaagctgaagggaggtctggaggtggtctcttactctcttggtgtgtctgtctccacattttatcttctgtttttttgttccccagccctccctgcgtttttcctgtatgtgactgtgtgtctgtgtgggtgatcgaaccgtaaggcttcctgctatttatttcactttatgcactgcagaagcatttgcgattgcaggaggtaaatatgtatcaaagacatgagttttagtgaaggatatctttttttttttttttttttgagacagagtcttgctctgttgtccaggttggagtacagtggctcacagcagcttccacctcccaggttcaagcaattctcctgcctcagcctcccaagcagctgggattacaggcgcccgctactatgtctggctaatttttgtatgtttagtagagatggggtttcaccatgttggctaggctggtcttgaactcctaacctcaggtgatccacctacctcagcctcctaaagttctaggatcacaggcatgagccactgtgcctggcctatgcctgaacaatatcttatcaagacatgtcttttagtcatcctcccgctatggggcgtttctgttctctttgtgtttttgccatttctgagtcttgctgctgtgggttgggagtgggcaggtgagagctggcttggggcctggccactggagttagagggagcagggcctggtgtctgttgccaccatcgattggtgatgtctgcctaaacactgtgttgcatctgctggggatgtctgccttgggagagcaatgggcatgtaggaagcaggtgtcaccatctctgttcttggggtgtcaaagcaaggctgggtgtggacatttgtcgaaggagtggggaatggacacagcccccaacaagcagatcgtgcagtcgtgcctgtcaggtgccttgccctaacagtggaaggatcatttgaggtcaggggttcaagaccagcctggccaacatggtgaaaccctgtctctactaaaaatacaaaaattagccgggcggtagtcgtgcgcctgtaatcccagctatttgggagactgaggcaagagaacatgttgccctgggagcttttgttaagggtccctgtgtggctccctcacgtatcagagttccaggaacgggtgtgggccctgataaaatcccagactcatggctcagtgaagtcgcacagctggacaagcttggagacccccaaataacttgcccaggctaccctggcttgcaaagggccactgctcatccaggggtgacggagccgtgctgggtgcctggcatccagtgggtgcccagtgtccagctgccatgtccactgtccatgcccttatcaccttcatgttgtcaccatgaccggcgccttaggtgctgtggctggtgccaggcccgtgagagctggggcaggttcactcagggtccaggtttgcctgcatcgtcccagaatcctcccatacctgggggagtgggctgtcagtgggagccagtaaaggggcgttgatttctttcccaaccagaagaggcaggggctatagacttaggtggagcccctggctctttgctggctcccagggttctaacagctgggccttctgagccctggggactggctgctcgtggctgagcccttcaagggcattgcgctccttctgcaaatgtaattcccagtctccatgtccaggcccagagcagccctggggagtcctcagggctcattttcctgcaagcgggggagagggggggacaggccctgtggtgattagaggaggctgcctgcgctcacagggggtggttaggctacccagaggaggaggcccctgcaggctggcagggggcctggtggctctggccccagccctgggctctgtggcatggagctgacaccacagacacctgtggggttggaccgctggactagcagcgagccctgcccttccagttggatagcttttccattccagagccgtcagggccgcagggctgagcacgcagctccacgctccctagagactcagccgtcaggggtcacctttctctagtcttgtgggaactgtttttgccctcagccgtgagaggcacttttacacataactcagttggagcatgactggcacgcaggagaaaaacattttgtgtcatttataggccctgcttgggcgagactctgggccgggaacgtccacatgcagccagtgtggggactgttttactctgagcctgaatctttctgctttggttccagatgccgtgtgtagggtgttctgtcaaagggaggaaaaagctcctcaatgagacagaaagatgcaactgggagtctggttttgcatgaggacgtgagcgtttcagttcacttttttttgtaagcatggttccccagtctgacctcagagctgcctggagatgggccccacccgcttcccgttaattaacaggctggtgctcggtgtggatgctggctcctccgtctccctgccctgggcccttttgaagctgaagtgttccaggggcagctggtgtggaaatagagttttctagaggttttagagttgagaagaaacctaaactcttcttagaagcatttcaagggtttgtcaccaggatggctctctgcaaatttgaggtggttctagaagatcttcccatatttcttaatccagagggagatggggatgggcgagaaacggctttgtccttaaggaagtcatgttctggttggaggacaggcacggcctagcattgaagctggtgagtcagagccggacctgtgagcggggccagaatggggcgcgggcttcagacttcacaaagcagaccacgcggcagcctggggctttagtatccaaatgtcctgccctccaggtttcattccttgccgtaaaatatcacgttaaaggaaaatgttttgttaaaagaccacagtcctgtcacctgagcacagtcgctgttctcggttcctctgtggctttccaggctgcaggtgcccattggtattgcggccgtgcgcccggcgggcatgaattagctgtgccgcctggctgctgacgggacgcctcgcctcgactgaaaactacctggagctgctcacccaggggcaacgtgaagaaaacgtgaaattctgtcgcttgttgcagctgacagcacggctgtgaggtcccagtgggcagaggcctcgtgcagggcacctcaccagccgggatgtcagagctggccagaaggagcggtgcccatggagggctgccagtgcccagagagccttccgaggtgtcacgttgggcagtgaaattcagagtcgggcagaggaggccctggggtcacacagggatctcctccaggctatgggttggtgaggtccagtgtccgggggtgaaggatagaggctctgtggtgagggctctggagctggccctgggctagcggaaacgcaggtaacgaaggaggctgtgctggtgggacttgtgcctgttcccgagggaggcattgtgagtgatgtttaggccaagaggattcaggatggaagacatggcttggtttgtagttgggagccggccaaggagtggtgttgagaaagtgcagtgtcaggcagacccgggaccgtggcggtgaggaggtgcagtgtcaggcagacccgggaccgtggtgatgaggaaatgcagtgtcaggcagacccgggactgtggtgatgaggaaatgcagtgtcaggcagacccgggactgtggtggtggtgaggaggtgcagtgtcaggcagacccgggaccgtggtggtgttgaggaggtgcagtgtcaggcagacccgggaccgtggcggcgaggaggtgcagtgtcaggcggacccgggaccgtggcggcgaggaggtgcagtgtcaggcggacccgggaccgtggcggcgaggaggtgcagtgtcaggcggacccgggaccgtggcggcgaggaggtgcagtgtcaggcggacccgggaccgtggcggcgaggaggtgcagtgtcaggcggacccgggaccgtggcggcgaggaggtgcagtgtcaggcggtcccgggaccgtggcggcgaggaggtgcagtgtcaggcagaccggggacttggagcacctagttccacttgcgggctgaccttctattttttgtcatcgtgttgggagcttaggaaagtgacttaacctctctgtgcttcagtttgtccgttggtagaaagggggtgattatactccccgctccatggggtttggaggaaggctgtgtgggttgtgctgagcagcgtgatggtgcaggctgtctgggtcagtgccgagggagcgagtcttccttcggcggttgtaatcagaagtagcttccaaggctgggtgctgccaggaggagctggggtgggtgaaggggcagtggggagcacggctcacacggccagcgggtgacctggggaggacggaggggggtgtgctgggcgcttcaggcgtgtggctccctttcctgtggggcgaaggtcaggaggggggcagggcctggctgtgtcagaatcactcagactcttaagacacatccagagtccccagccccaccccaacccaacgcacccactccaccagaagaaacggggcaggtgggggccaaatctgtgagttcccaagggaggactgtgtggggcaggttgtggggggcggcgctagcatggctggaaacatctcgaggtttgaagccagagcctcaggtgagactcaagggtccctgggactccctcctgggtgtctgaccgtttatctttcatggagttacaggcgaagacatttctgtgatgtcttgaattctgctttttcctgattttgagcaaatgaaagccagctgggtgtagggagtcaggtgccttccccaaggaaggggctgagagggtggtcacaccaggaccccaagggacagggagcagcgttcccaggggcacacaggcggcctcctagaggtagggatgcgttggtggcggggggggccccgcactgctgtgtgccttcaaggtggcactatttacgtggcccctgagctgcagggtgaccgctagccctgggctgtgtcctggctcccccgcccctcctgaagtgacccccatgagacagggcaggtatatcccacgagcctctgccgcccagcgtggccggggctcagtgggaccatggcggctgcgatgctgctctctgcagctcagagtcactctcatccccagcagtcgagtgcagagcctgggcctccggcctccccaccccctccacacagccccaggaccaaggcagcagctggcttcggtttctgccatgtttttccaattatgtggaatgagctaaaaacagcaggagtgaggccttatttgggagttgccaccgccatcctcggaagctgctgttcctcactgccacccctccagccccatcctctgtggaacgtgcccctgttcttttgacttttgtctcctgcacatccctcctgcttgggggcctttgggcagtgggcttagcggcgtgcaccatgccactcgggccacacatgccctggccggtggctctcagagctatgtccagagggtggccaggcagtgctcccggcagcgcccagatgaggctggggtgcggcttggggatttgtgggccgctggccacagctcacccagacagagttttaacagatgttcgtctgtcagggacaggaaacaaaaagaagtcggggatggagtgggggcagcgggaggaacagagggggccactgtcgagtctgacgggcagactgacagctggagccgacggcaaagcccctcacgtccctccgtctgtccgggcggattagctcaggaagcagggcccgctcagctcggggccgaataacgggcgtttgttcccagagtctggctgtcttgtcacttatcagggaagtaggtcaaagggaaaaaagaaaggaggtcctgtggggccgagtctgccgcggccgggcagtgattggcgttgactttgcaaacagaaggcagctgctgttctcagccatggaccgtgaatttttaatagcaagaaaatcagctcacacggttcaggaagttgtggaagaagcctgagtgctaactttatttttttaattgaggtataacttgcaggcaataaaacgcacacattttaacgtgtacatttggattaactttgacagctgcatatgtctgcataactaccacacggtccagacagagaacatttctaccactgggaaagttcccggtgcccctttgccatcctcaacccccgccccctccaccactctcctgacttctatcaccttggattagcgttgcctgttccagaactacatggaaatggaaccacgcagctgtgctcttctgctttttggcctgaatactcactgtcagggctgatgcaagaggagaggggcgcatcatattcctggagaacgctgtcaccgtggagcgggggcacagggggaatggcatctctgggatgggtgaatgctgtgggcgcctttccacaggctcagagttagactgtggtcactggttttgtcccctgcagcctcttccatgtcccccttgtgactgcagcataagcccagctccatgcggaccccagaccagctccgcagctccaacagcttccctttatcttcagtggcgagctttgcgcttgcagggtgcggggcctggtgggacgcccacgttgcccagacagaacccttgtgcggctgcgggcactccttgccctttccgcatttggtgatgactccttgtttcgtttcactgaccgtgccctgtgcctctgctctccctccccagttccgtgtgccctggggtcagtgatagaagacacggcccctggaccccaagtctgctgagctgacacctcgggctgccgctcacctgcagagagacactagaaggctccgactcccttcctggcccccactctgtttttctaccttttaccgcctattccaatggaaatgcacgatttgtttctccctgtgcacatctgagtgtggacctccctgcccctgctcgtgctgtgcccaccacctggagcacccttcccctgccccctgcccccggccacagcgcccctccatccagaccccactcctgcacacggctcctccgcccgtgcgcagccctctgagagtgtggcaggtgcaccaggctctgctctagggagcttcttcctcttcctgtgtcccacgggaccaacatcgggacccaggaaacaggctgggagagttcggtaacaccttcaagagggtttgagagctgaggttctttggtcttcagtggagctggcagtgactttcttgactttgtcaagagaagccccccgtctctgtgccacctctggggatgtgattgaacggaaatcagagcatccgagttccagcctcagccctctgctgtgtggctgtgaaatgtaggccctgtgtgccttgctgacctgggagggtcgaaaggacggtgtctggggaaggatgcataagttgtagagtgccctgcacttgtgataggtggggccgcgtgaactgctgatagccatcttctgtcagttggggcagtggcattgtcacatggttccattctaatccgttattttggctactgccactgaggcggggtgggtgacaaaagtaacgtttcttgggggccactgcagcggtcatggtcctgagccctatacccaggcacgcgtcctgggagctgtgtgaggggtcgtccgtggctggccctgcttctttttttttttttttttttttttaattgagacagagtctctctctgtcacctaggctggagtgcaatggcgcgatctccgctaactgcaacctctgcctgctgagctcaagcgattatcctgcctcagcctcccgagtagcttggactataggcacccgccaccacactcggcttattttttgtatttttagtagagatggggtttcaccgtgttagccaggatggtctcgatctcctgaccatctcgtgatccacccaccttggcctcccaaagtgctgggattacaggcatgagccaccatgcctggccggccctacttcttaaatgggcctgaggcacatggtgccgagagctcgctgaggtctatggaggaagggcgcagatgggatctgggcctggcgtcctggccggcccccaaggccttctccacagagtttccatgtataccggggtggccttgcggaggggcgcagccatgcgtcaggctggagccagctgcagaggccacagacagggtgtcatgagcagtacaagtaaccgctgctgtccattgaacacctactgtgtgcctgggttcagaaaggcaccctgtgctggcttttaaagaattaggccgcctgcctaaaggggggagtgtggccttctttttcatttaagtcaccaactgttttatacatccacgcccctaaattcttcagttttaggcaaagatgagagggctgcccaggcgtcatttgctcaacaaaaccacacttcacttgtgaggctgtgttccctcaccagggtccccagcaagggggtgtgagtgtttagtaccacagggagggctggcgcggtggctcacgcctgtaatcccagcactttaggaactcctcacctgaggtcaggagttcgagaccagcctggccaacatggtgaaatcccatccccactgcctgcctggggagtggccatgcagccatgggcctgaggttgtggtggggcatgggggcagaggcaggcagtggggggccacaggaggggctggctggcaccgagggatgggagaggaagggacccgcctgcaggtcccttcctgaggccggcactgacttggtcactctctggctgccctgaccccaggcagagcagcgactttcctgttttagagctgagcagacagagcccctgactgcaggccaaggtgcctgccagctgctcctggagggccatagcctctctgtgcttgctggaaggtcccaggcaccgtgcaggtgacagtggccggcctcaggttccagcagagccagcatcgggcccagccacttcccttgtgctttgtgaccctatggtcacttggcacaggatcccgggtcaaatgctgcggttgcggcatttgccccaccacttacccctgggggcagcggagaaacttaatcaattgctaaacaacaaaaataatctggccgcctgccagctgggaagccactgtggccaggctgtttatggccttgggatctgcgcagtggacagtggcctgcaccgtgaccccgttcatcctgcgtgccccaggcccaggaggtggctcaagccctctgcctcctgtaagggcacctgagaaggaggccctggagctgggagcagagctgggggtgggcgtccgggcagcagaggccgattctcagctttccctggatctcagctttccccggatctcagctttctgctacccgtgtgaaaagaagccaggagaacacagctatcctgggttggtgccggctgtggtgggaggcctgcggtgggagcctccgggggccactggacctttcctgggtggcctgtggcctgggagctgcacttggttcggtgcagggaggttgtgacatccactctgtctgcagggatggccggggccctgcggctgggtgatgaggtgggatggaggtgtccggggctgccctgcctccttttgccaaaataacaaaaattatcttgtttgttgtgaaaaaacctgttttcccacattggggcatggagggtattaactgtgatgaccttctgagttcctgcacactggtgacccattggcagggtctcctcctggctctggcaggggtggctcaggccgctgggtgacggtgtgctggccagatagttcctggggctgcaggtggcttctttcgccccatccctcccatcccctttcattcttcctgtcaacacatctcagaccctggacaccgaatgagccgtcggtacccacaccccagggcaattcagtggaggggtaggtggctcgttcccccacgttgccccaggaagaggaccctgtccccggcatcctgacccacctcccttagagaccgagagcctctaaggataaacccattcacccgtgtttcagaggcttttttttcctcttataaaataacatttatacgttcgctgtagcaaggaaaacattataaaaaatagtgaagaaaatagaaattacccataattttgccacacagacttagttgtgtccatgtatcttgtgcaccttttttctgtttacggatcaaaatcgacttttagggtcaggcgcggtggctcacacctgtaatcccaacactttgggaggctggagttggggttggggggtggatcactgaagatcaggagtttgagaccagcctggccaacatggcgaaactccatctctactaaaaataaaagattagccaggcgtggtggtgggtgcctctaatcccagctactccggaggctgaggcaggagaatcgcttgaacccaggagacagaggttgcagtgagccaggatcacgccactgcactccagcctggcaacagagcgagactctgtctcaaaaaaaaaaataaaaataaaataaataaatacataaattgacttttaggagattggttcaaacaatgtgtgtaatgttgtgtctgagtgtttttcatttatcgttcatgcaaattccgacatcattcactcttctccagagtgtgctgttttcctgcctgtgtcatcacccgtcaccttgaatgccctcgtttaggtaaaataagtacattttattcaaaaatatttgaggacatttgggttgtctccaggttcttggtcttgagttttgctgttcttgtggagccatggtggtgtctggttgcaggaacctccatgcgttccagctgctgcttctgcctgtgttcttagagaggaaatgctggggtccgcggttcccgggctgctgaccaggaagcctgcggtgctttacggcccttccagaagcgggagatgcccccacttaagtgtcagacaggcctttccacctcactggcagctctgagcggctcccttctatttgcagatgactgagaagttaccaatttccacgtttactgactgctgtttctcctgttaatttgtatttatagtcttcgctaatttattgctagggttttggtgttgtccctattgacttgtatgccttttaattttttaaacaacattaatagacttcatttttttagagcagttttaagtttacaggaaaattaagggacaagtacagagagttccttccacctgctgtcctcctctcctcctccccaccttccctccttcccctattgtaactttctttctgatattataaaagtcactcatggctgggcgtggtggctcacgcctgtaatcccagcacgttgggaggcagaggcaggcagatcacctgaggtcaggagttccagaccagcctggccaacatggtgaaaccccgtctctactaaaaacacaaaaagttagccaggcgtggtggcgggcacctgtaatcccagctactcaggaggctgaggcaggagaatggcgtgaacctgggaggcagaggttacagtgagtcgagatcgcgccactgcactccagcctgggcaataagagtgaagcttcgtctcaaaaacaaagtcacacacgcttcttgtacgagggtcatttggccgaggggccagatggctcaccatctagttgggacaggccatgagctcggaatgctttttacatatttacatggttgagaagaaaatcaggagaataatgttttgggacatgggaaaatgacatggaatttgcattttagtgtccataaatgaagttttgtttgctcccagctgtgttgactgaggcaggctggcttcctacagctgcggcagagctgaggaggcgggaaggagaccgtgcaggccgcagcaccgaaaatatttgctctctggcccttcccagagtgcttgccgacctctgtccgacagctagaaggaaggataggacccgtccgacgataaccactgttgacatttgagcgcgtttccttcccggcttttgtgtgagagtggcagtctgtttgcttttgtggtcgggatctgctgcacgcacggcgggctgtttgcatgaggcttcctggaggatagggctgggctcggagctgcacgcagtggggcgtgtcctgcatgcagtggggcctcagaagagagctgtggtgggcggggcagtgccaacgctggtgggtgccaggcctccacgctcagatcagccccggcgacaggtttgggccaccctctctctggcctctgtgcagtggcccaggccgtctgctctgcctggcacacttgcctctgtccttccactgaagcgctcctcttaccctctgctcccggctgggtacgttgaattgtgtccctcaaggagatatgctaaaggtctaaccccaggaacctgtgtatgtgatctaatttggaaacagggtcttggctgatgtaatcaagcgaggatgaggtcaccctagagtagggggcctatatccacggtgctggtgtcctcatgagagcaggtgagcagacactgacactcaggggtgaaggctgcatggagtcagaacagggcttagtgcgatggcggccacaagccaaggaactccaagtatttcctgcaacaccagaagctggaagatgccaggaaggatcctgccctggagccttcggagggagtctgtccctgcagacgtcttgacttttgattgcagggatgcatgtcttagggtgtgtgggggggtgcatttctgatgttagaagccacctggttggtggcgatgtgtcacgggagccctctgcaggttctgcgtgtccatgtggtcggggacagaggtgggcagggacggacggtgtcgagctggacatgtccatgacgtcggccatcccttgggatggcttttttgttttgaggataaggctgcctgccaggaagctgtgccctgcctggcccttgccccaagcccctggcctgtgcttggcctcgcggaagggatgtcgcccttctctcctgcatgcgtgcagggaggaaggggagaggtcagcagcccgcctggaggaggctcgggcgaggggaaggtttcactttcaggcaatgttgtggggctgtttaaacaaccccaaagaaaaccatttggccaaactgttagtttccaaacattttacttccttggtgtttaaataaattcctaccaagactctgtagctggtcccagggaaggagttggcctctcttctttatagcccggcacagtcagtcccctgcacctgcccctcccaaccccaggcctgcttccccgtggccatggctgctgcccggacctctctacacacagaacctcctggaggccagctgtgggcaccagccttggcagggctgtggcggagcccaggctgctggtactctctctgcagctgctccctgctggcctggctggacagagtccccaccaccactggggtcacctctgtgctggtcacagctcactcagaccttcaggcaaatgggttggatcctgcctctctcccaggtgtctcagtctctgcaaaactcaaaaacctcagaggccttgcagcctgaggggtgtcagagacacctccttcgaatcagtaaacacctacagattcaccccagcagtgaaaggactgcttcgccacagaggtttgatttactcctaagtaattggaagggatgccgagaataggttcctcatggtgggactagaggccctctgctgacctagttaacagagggctagggctgggtgtgctcagcccctgaaggttctaggcccatttgggacaccccgccagaacctgccacaacctgccatgtggtgacagctacctaaatcccagaggctcttgagctggagagcagacctctcaatctcagcaggccccccacacagaccccataaccctagtctgccttcacagtacagttcgtggctatgtgttcacggatggtgttgttcacctaaggtctctgccctgtgaccccaagggcgtcctgagggcagattccaagtctgtttcgtccacccctccttccctagcagcgggtccagggcctggcctgaactagcttcccacagagatactggtgggatgatgaaggcagccaggcggcaagtgaaaaacgcacttcctgcatgtgctggctcctgggattgaagtgtttgaggaagcaaagtgaagtgagctttcctcttgcggctgtgtgtccttgggccgggagcctaccctctctgagcgttggggtccttgtcagtagaatggggcatcctcatagctcaaggggtggtgtgtgaaaattgtgctattgtgttactttaatgattttttttttttcgagacaaagtctcaccccaacgcgcaggctggagtgcagtggcgcgatctcagctcattgcaacctctgcctcctgggttcaagtgattctcctgcctcagcctcccaagtagctggaattacaggagtgcgccaccaggcccggcatatttttctatttttagtagagagggggttttaccatgttggctaggctggtcttgaactcctgacctcaggtgatccacctgcctcggcctcccaaagtgctgggattacaagcatgagccaccgcgcccggcctactttagtgatttcttaggaggacagagggaacgggctggcaagacaggcttggaatgtgttttgggatcaagtgccggtttctgtctggcactggcgttctctgtggggccatgatggacacactgctgaggtcaagcgtgattcgtcttgcgctgtgcctggcagtctcattggaaagttctgtagacatcgtgtggatggggctcttcccggccaagcccttggggaccttccaggactgtgatctccccacagtggctgttaagcagggacctttcgtgaagtggagtctctggtcccctccaagtcatagctagacagggactcgggcatcgccaagcctggctgattattcactggatgaggagacaggcccagagaggggcaggaacctgcccgaggtcacccagcaggccccagaggtttcggtctcggattctccctgctcatccctggatgtagtgctgctgtggatgtggttctgtgctgggggctgtggagagcagggggcttgtgccaggaccccagtgagggtggcgccctcgccatgaggccgactgttggtatggggcggccatccactggggtgtggggaggaacagctttcctgaggaggaggtggcgggaggaacagcttccctgaggaggaggtggcggtgctgtgtgacctgggccttgaaggacaggtccattgtcaacagaacattttgggagtggagcctagagggagaaaatttgttgaaattcagattcccctccccctaccaatacacaccaaatcagatgcccctgaccagatctaaatttggctctcagagatttccattgtagctgggcacttggggaaccttctaagtgctgcctctgcctctccccagcctgcctgcctcagtttccccagccctgggcccgtgtcgctgttgccatcacgtgggcgccctctagtggaggaatcagattatgcactccggggcttggagcaggagtcaggaggggctcctgtctttccttgaaacgttggatgccgggatcctggaacagtctctgcattcctcctggcgagaaccagagcctgggcacaggggaccatctgttgtttgaaggctgcagcctggcagggcactcaggagatctggcagttggctgcagggccaggtctaggggccagggcatcagggaggctctgggctggttcagccccgggcccctttgcagattgtgacctgggcccctgtgcaggggcatggccacaggatgctgggaggggtctctgaccctgaccttcttggctctgtgcatccttgagaccagaaaggtctggaacaaatgagtagacgatgccctaacctggggagggagccacatcctgatcccagcaacctcgggaaggatctgtcaggattatggggcaccctgggggccccaagtctgcatgggtctccacttgcaatttctgtaggaagctctgataaatccaaactgggggtcctaggacacagtcagaaatgctgataccgttgtgtgtggagcctcgggccctgggggtcaggagcatgtggagggtgggccacgggggttcagaagagaatcctgtaaccccccaccccccaaactgaagcccacttgagggccatggctgaaaggttggggggtctccgtgcgtcctgtggagtgggtggtgaggagtccttgggtttgcacgcctctgggcctgagcggcgggaccccgtccacagcggatccctgggccctgttgctcagatgctctcagagtgttgctgtggccacggagggagcctgagttaagcttctcttgtgccggttgtacgctgtcaggtcacactggtgagttaggcagggcacagatgcccagagcagagggaactttccttggggattcaacacgtgcaagtcttaggggctggcaaatcctgccctcagctagagagggggcttttatttgagaccagaatcacctgagcatcctcctgtccccagctgtgtccagcctgtctgcagggacatcctgagaggaccaggctctcccctcatccacctgcctaagtgccactctgaaccctgtccacctgtgccgtggaggggcgtgacctcaagctgctcagccagcagcaggcttggccctggggggcagcagagacccaggtggctgtggggtgggtgcttcgtggcgtggttctgaaacttcgttggaagtgtgtggacagtgccttgcctgttctctgtgggaccctatttagaaacgaggtctgagttactgggggtcatcactgtgttctgatggcccagctgtgtggaggccgcggtgcagccccatccaaggagccagggccctgggtctagccgtgaccagaatgcatgccccggaggtgtttctcatctcgcacctgtgttgcctggtgtgtcaagtggtcgtgaaactctgtgttagctcttggtgttcctgaaagtgcccccgggtctcaggcctcagaaccagggtttcccttcatctcggtggcctgggagcatctgggcagttgagcaaagagggcgattcacttgaaggatgtgtctggccctgcctaggagccccccggcacggtgctggggcctgaagctgccctcgggtggtggagaggagggagcgatgaagtggcgtcgagctgggcaggaagggtgagcccctgcaaggtgggcatgctggggacgctgagcagcatggccagcagctgggtctgcagcctggtacccggcgggacttgtggttggggctggtttgtggccaggagaggggctggcaggagacaagggggactgtgaggcagctcccacccagcagctgaagcccaatggcctggctgtgtggctctcagctgcgtgcataacctctcagtgcttcagttctctcatttgtaaaatgaggaaacaaacagtgccagcctcccagaggtgtcatgaggatgaacgagtgaccatgtagcatgggctgggtgcgtgtcacctaacatcaccagcctttgcaaggagagccctgggggcctggctgagtatttcccttgcccggcccaccccaggcctagacttgtgcctgctgcaggcccttgacccctgaccccattgcacctgtctccacaggagccgaggaggtgctgctgctggcccggcggacggacctacggaggatctcgctggacacgccggacttcaccgacatcgtgctgcaggtggacgacatccggcacgccattgccatcgactacgacccgctagagggctatgtctactggacagatgacgaggtgcgggccatccgcagggcgtacctggacgggtctggggcgcagacgctggtcaacaccgagatcaacgaccccgatggcatcgcggtcgactgggtggcccgaaacctctactggaccgacacgggcacggaccgcatcgaggtgacgcgcctcaacggcacctcccgcaagatcctggtgtcggaggacctggacgagccccgagccatcgcactgcaccccgtgatggggtaagacgggcgggggctggggcctggagccagggccaggccaagcacaggcgagagggagattgacctggacctgtcattctgggacactgtcttgcatcagaacccggaggagggcttgttaaaacaccggcagctgggccccacccccagagcggtgattcaggagctccagggcggggctgaagacttgggtttctaacaagcaccccagtggtccggtgctgctgctgggtccatgcgtagaaagccctggagacctggagggagccctttgttcccctggcttcagtttcctcatctgtagaatggaacggtccatctgggtgatttccaggatgacagtagtgacagtaagggcagcctctgtgacactgaccacagtacaggccaggcctctttttttctttttttttttttgagatggagtctcactctgtcgcccaggctggagtgcagtggtgtgatctcagctcactacaacctctgcctcctgggctcaagtgattctcctgcctcagcctcctgagtagctgggattacaggtgcctgccactgtgcttggctaatgtttgtatttttggtagagatggggtttcaccgtcttggccaggctggtcgcaaactcctgacctcaggtgatccacctgcctcagcctcccaaagtgctgggattacaggcatgagccaccacgcccggtcaggccaggcctcttttgaacactttgcacaccatgggtcttttcatccaggggggtaggtacagttgtacagttgaggacactgaagcccagagaggctcagggacttgcccagggtcacacagcaggatgtggcaggtgtggggctgggcctggcagcgtggctccagctttccagcatagaaatctgtgaaagcagatagtttgtcggtcggtaggggagactttctgagacccgccccagcggctcagagggtagtagccaggggccttcctgggggctcataacccagaacactgaatgggaaaaccctgatggaggaggcgcagtggagctgtgggtgccgatgggaagtcccagaggagctgggaggtcagtagcggtgctgccctctgtggagcacttagtgggcaccaggtgtgtttccaggttcatggccctgggacctgaagctcagaaggtgaagtaacttgcccagggcacccgtcgggcagcggcgggcagaggatttgtgggctgtggagcctgtgctcgtggcccagccctgggggttgtgagtgtgctggccggggagcttttcctgcaagtggactggtgtctaggagccagcatgtcaggcagcaggcagcgggagtgcagcaggcagcgggagcacagcaggcagagggcggggctcgagcagccatccgtggaccctggggcacggaggcatgtgggagagggctgctccatggcagtggctgaagggctgggttgtgccccgaggagggtggatgagggtaagaagtggggtccccaggggctttagcaagaggaggcccaggaactggttgccagctacagtgaagggaacacggccctgaggtcaggagcttggtcaagtcactgtctacatgggcctcggtgtcctcatctgtgaaaaaggaagggatggggaagctgactccaaggcccctcctagccctggtttcatgagtctgaggatcccagggacatgggcttggcagtctgacctgtgaggtcgtggggtccagggaggggcaccgagctggaagcgggaggcagaggggctggccggctgggtcagacacagctgaagcagaggctgtgacttggggcctcagaaccttcacccctgagctgccaccccaggatctgggttccctccttggggggccccagggaacaagtcacctgtcctttgcataggggagcccttcagctatgtgcagaaggttctgctctgccccttcctccctctaggtgctcagctcctccagcccactagtcagatgtgaggctgccccagaccctgggcagggtcatttctgtccactgacctttgggatgggagatgagctcttggcccctgagagtccaagggctggtgtggtgaaacccgcacagggtggaagtgggcatccctgtcccaggggagcccccagggactctggtcactgggcttgccgctggcatgctcagtcctccagcacttactgacaccagcatctactgacaccaacatttacaaacaccgacattgaccgacaccgacatttaccgacactgacatttaccaacactgtttaccaacactgacatctactgacactggcatctaccaacactgacatttaccgacactgacatttaccaacactatttaccaacactgacatctactgacattggcatctaccaacaccaacatttaccgacaccaacatttaccaacactgaaatttaccgacaccgacatttaccgacaccgtttaccaacaccgacgtttaccgacaccgacatttaccgacactgatatttaccaacactgacatctactgacgctggcatctactgacaccgatgccagcatctaccaacaccgacatttaccaacactgacatttaccaacactgacatttaccgacattgacatttactgacactgacatctactgacactggcatctactgacactgacgtttaccgacactagcatctactgacactgacatttaccaacaccagcatctaccaacaccgacatttaccaacactgacatttactgacactgatatctactgacactggcatctactgacaccaacatttaccaacaccagcatctaccaacaccgacatttaccaacaccagcatttaccaacaccgatgtttaccaacgccgacgtttaccgacgccagcatctaccaacactgacatttaccgacaccgacatttaccgacactgacatttactgacactgacatctactgatactggcatctaccgacactgatatttaccaacgccagcatctactgacactgatgtttaccaacaccgacatttacgagcaccgacatttactgacaccaatatttactgacatcaacatttagccatgtgatgggggccggcttgggggcaggccttgctcttggcactggggatgctgcagagaccagacagactcatggggtcatggacttctgcttcttctccagcctcatgtactggacagactggggagagaaccctaaaatcgagtgtgccaacttggatgggcaggagcggcgtgtgctggtcaatgcctccctcgggtggcccaacggcctggccctggacctgcaggaggggaagctctactggggagacgccaagacagacaagatcgaggtgaggctcctgtggacatgtttgatccaggaggccaggcccagccaccccctgcagccagatgtacgtattggcgaggcaccgatgggtgcctgtgctctgctatttggccacatggaatgcttgagaaaatagttacaatactttctgacaaaaacgccttgagagggtagcgctatacaacgtcctgtggttacgtaagatgttatcattcggccaggtgcctgtagacacagctacttggagactgaggtgggaggatcgctggagtccaagagtttgaggccagcccgggcaaaggggacacaggaatcctctgcactgcttttgccacttactgtgagatttaaattatttcacaatacaaaattaagacaaaaagttaatcacatatccactgccctgcttaagacagaaaacatgggtgttgttgaagccagaggcagctgctggcctgagtttggtgattggttcctaagcagttgaaggcagttttgtttttccatagatgtctgttctccctttgctgggtgcagcctcgccctgctgctgtggtcgggtttcagtggcctcgtcccgtggacgcagcctcgccctgccgctgtggtcgggtttcagtggcctcgtcccgtggacgcagcctcgccctgccgctgtggtcgggtttcagtggcctcgtcccgtggacgcagcctcgccctgccgctgtggtcgggtttcagtggcctcgtcccgtggacgcagcctcgccctgccgctgtggtcgggtttcagtggcctcgtcctgtggacgcagcctcgccctgccgctgtggtcgggtttcagtggcctcgtcccatgggcgtgctttggcagctttttgctcacctgtggagcctctcttgagcttttttgtttgttgtttgtttttgtttgattttgtttgattgtttgtttttgttgtcgttgttgttgcccaggctggagtgcagtggcgcgatctcagctcactgaaacctctgcctccttgggttcatgccattctcctgcctcagcctcccacatagctgggattacaagtgcccgccaccacgcctggctaaattttgtatttttagtagacagggggtttcaccatgttggtcaggctggtctggaactcctggtctcacatgatccacctgcctcggcctcccaaagtgttgggattacaggcgtgagccaccgcgcccagcctctgttgagcatattttgaggttctcttggtgccagtgatatgtacatgtgtccccatcgcaccatcgtcacccattgaggtgacattggtgcctctcctcggggtggatgcctccctctgtttccagcaacttctgaaggattttcctgagctgcatcagtccttgttgacgtcaccatcggggtcacctttgctctcctcagggctcccaggggaggcccgaatcaggcagcttgcagggcagggcaggatggagaacacgagtgtgtgtctgtgttgcaggatttcagaccctgcttctgagcgggaggagtctcagcaccttcagggtggggaacccagggatgggggaggctgagtggacgcccttcccacgaaaaccctaggagctgcaggtgtggccatttcctgctggagctccttgtaaatgttttgtttttggcaaggcccatgtttgcgggccgctgaggatgatttgccttcacgcatccccgctacccgtgggagcaggtcagggactcgcgtgtctgtggcacaccaggcctgtgacaggcgttgttccatgtactgtctcagcagtggttttcttgagacagggtctcgctcgctcacccaggcgagagtgcagtggcgcaatcacggctcgctgtagcctcaatctccctgggctcaggtgatcctcctgcctcaccctctgagtagctgggactacagacacataccaccacacccagctagtttttgtgtattttttgtggggggagatggggtttcgctgtggtgcccaagctgatctcaaactcctgaggcacaagcgatccacctgcctcggcctcccaaagtgctgggatgacaggcatcagccgtcacacgcagctcaatgattttattgtggtaaaataaacatagcacaaaattgatgattttaaccattttaaagtgaacagttcaggctgggcgtggtggcttatgcttgtaatcccagtactttgagaggctgaggtgggcagatcacctgaggtcaggagtttgagaccagcctggccaacatgatgaaatccagtctctactaaaaatacaaaaattagccgggcatggtggcaggtgcctgtaatcccagctactcgggaggctgaggcaggagaatcgcttgagcccgggaggtggaggttgcagtgatctgagatcatgccactgcactccaatctgtgtgacagagcaagactctgtcttgaaaaataaataaataaaaaaaattttaaaaagtgaacaattcagggcatttagtatgaggacaatgtggtgcaggtatctctgctactatctacttctagaacactttcttctgccctgaaggaaaccccatgcccaccggcactcacgcccattctcccctctctcccagcctctgtcaaccactaatctactttctgtctctgggggttcacttcttctggacgttttgtgtgactggaatcctgcaatatgtggtccctgcgtgtggcttctttccatagcattgtgttttccagattcacccacacattgtcgcacgttatcagaatctcattcctgactgggtgcagtgggttaggcctgtaatcctaacattctgggaggccaaggcgggacgatcacttgaggcaggagtttgagaccagcctggccagcctagcaagaccccagctaccaaaaaattttaaaagttaactgaacgtggtggtggtgggcacttgtggttcccagctacctgggaggctgaggtgggaggatcgcttaagcccaggaggtcaaggctgcagtgagctatgatcgcaccactgcactccagcctggacaacagagcaagaccctgtctgaaaaaaaaaacaaaaaaaaaagttcctttctttttgtggctggatgacatcccattgtatggccacagcacattttgtttgtctgtttatcgggtggtgggcagtggtttccaccttttgtctcctgtgaataatgctgctgtgaacatttgaattcaagtttttgtttgaacacctgttgtgaattatttggatatatgtgtaggggtaggattgctgagtcctatggtaatgttaggtttgacttactgaggaaccattaaactgttttcaacagtggctgcgccgttctgcatccccaccggcagtgtgtgagggttctgactttacctcctcacaaacgcttcttttccatttaaaaaaatattcagccaggtgctctggctcacgcctgtaatcccagcactttgggaggccgtggcgggcggatcacctgaggtcaggagttcgagacgagcctggccaacatggtgtaaccccatctctaccaaaaatataaaaattagccgggtgtggcagcgggcgcctgtaatcccagctacttgggaggctgaggcaggagaatcacttgaacccgggaggcagaggttgcagtgagccaagatcgcgccactacactccagcctgggtgacaagagtgaaactccatctaaaataaaacaaaaataaaaataaataaaaatttattaaaacattcatcacagccagcctagtgggtgtcccatgtggctttgcctcgcatttccctgataactaggatgctgagcgtcttgtcccaggcttgccacacctcagcactttgagatacgtcgcacagtccccatttgcgaacgagaaatgaggtttagggaacagcagctgtgtcatgtcacacagcgagcagggggtctctgagccgtctgaccccacagccgaccaagctccaatccttaccgcctcctagtgttgtggatgtagcccagggtgctcccacatttttcagatgagaacaccgaagctcaaaacaggagcgttttgtccacattggatacacgatgtctgtggtttggtcctgaagtcactttatatctcagtggtccagactggagtaggacagggggttctggggaatggggaaggtgtctcaggtgaaaggaaggaattccagattctccatactgtccttgggaagttagaagactcagagggtctggcaaagtcagacaaagcaagagaaatgcagtcaggaggaagcggagctgtccaggaacaggggggtcgcaggagctcacccccaggaactacacttgctggggccttcgtgtcacaatgacgtgagcactgcgtgttgattacccactttttttttttttttgaggtggagtctcgctctcttgcccagtctggagtgcagtggcacgatctcggctcactgcaagctctgcctcccgggttcatgccattctcctgcctcagcctcccgcgtagctgggactacaggcgcctgccaccgcgcccggctaatttttgtatttttagtagagatgggatttcactacattagccaggatggtctcgatctcctgacctcatgatccgcccgtctcggcctcccaaagtgctgggattacaggcgtgagccaccgcgcccggcccgatttcccactttaagaatctgtctgtacatcctcaaagccctatacacagtgctgggttgctatagggaatatgaggcttacaggccatggtgctggacacacagaagggacggaggtcaggaggtagaagggcggagagagggaacaggcggaggtcacatccttggctttcaaaatgggccagggagagacaccctctgagcatggtaggacaggaaagcaagattggaacacattgagagcaaccgaggtggctgggcgtggtggcttacgcctgtaatcccaacactttggaaagctgaggtgggtggattgcttgaggccaggagttcaagaccagcctggccaacatggtgagaccccgtctctactaaatatacaaaaattagccaggcgtgatggtgcatacctgtaatcccagctgcttgggaggctgaggcaggagaattgcttaaacctgggaggcggaggttgcagtgagccgagatcccgccactgcactccagcctgggccacagagtgagactccatctcaaaaaaaaaaaaaaaaaagataaaaagaccaaccgaggaattgaagtgggggggcgtcacagtagcagaagggggatcgtggagcaggccaccctgtggtcatgcactggaagctcattacctgacgatttggagctcatcactgggggcctaaggagaatagatactgaaggatgaggagtgatggcgcggggcacgggtgtctttggtggccagaacttggggactgctggggtgcctcactgcaggccttctcagcgccctttatatgcttacacaggctgtttctaagagggggatacattgcataagcgttttcagactacctcatcatgggtccctttctttaccctctgtggccctggtggcgcactctctgggaaggtgcaggtggatgcccagacccgccctgccatccacctgcacgtccagagctgacttagcctcgagattgctgctggcacctcctgccccgggacacctcggatgtgcccgtggagatgctggctctgtgttttctgctggagtttggtgcgtcttttcctcctgcaagtggccaccgctcttgggtatgtcctcaggcttctgcgagtcatggctgcttctcaggtccttgcccagcgccaggagcaaaccctcctggcactttgttcaggggtggatgcgccagtgttcctgctgtggacccccatctcacatgagggtcttgggcctgcaggctcgttcaggaaacacccgctgagtatgcagtgtgtgccagctgtgtcccaggcaatggcggggacagtggctgctgctggggttgtggtggcttctggggactctggggacagctgaggtgcaaggagccacggctccttgaggatgcagttggactccaggtggaagggatggttgggggaggtataaatggggtcagggaggagacacatttggaacaatgggaacatttttaagatgctatgtcgggaggcaacaaggtggccaacccaggtgctgaggagcccacaccagccctggacgtgttttgccgctcacctttgctggggagtggtgggagagaggattccgttccacgtggtggtgtgcgcagctgggctgtgtggagctgggcgctaggaggaaggtgctttctgcggggctagccgggctctgcctttgaacacaatcaggctccaggttttcagcatccagtgcatgagaggacttcacgggcagctgtggctgatcccttgatgaattgggagaagaacaaaggtctatgaaatgaggtttcatgtagatggcattagagacgcccacaacagatttacagagtggagcggagacggcggatgggtctgggaggcccctcctgctggccttgactgtgacagctgtcctgggaatcagcttccaggccgccccagcagcctgactgacacacacaggggttttagccccatcctgcgaccagctgttgccatcatcagtgacagctgggagtggcggtggttccagccctgggcaccctccccacctgctggggcccacccagggcagtcctgacacctacaggttgcttggagccgcatccgagtcctgccccaccacgtgtgaagcccgagtggtcgtgggctgaggtcccctgattgcatccccacttcccttctgcttcacatagctgcctcttctcaccgtttttccagcctcctgggctaggaattccagtgttgtgctggctttgccccaggacacctccttagccctcttcctgagtctagagccccgggggttggaagttctggcccctgggacacctgcagccacactcagcttctcctgtgagcctccagcatgtcccctcaggaccaagccctcacgttcttgcctccccgcccacctgggctcagccaggggaaggcctggctgggagcgtctcccctctgccctgcccttctcccctctaccctgcccttctctcctctgccccgccatggcttttatatcctgtgccacaagacatggctgtgtgtgaaagtggcagggtctggcatctctgtgggtctctgaggcccacgctccagtgccactcttcccacccgctggccgtgccctcatgctggagggacagcccagccctctcccgaaccccagccccatgtgcccagctgcccccggccctctcccctggaagccggggtcactccagccgtatgccatggtggggacatcctgcttccttggccttccagggaaggtcctctttccaaatggcgacacctggtccctgcctggaggctggaagctgtggcccttgtatgcccctccagggtctgtgcgctcggttggcccgagttcccatcaccgtcgtcatcatcaccatcatcattgtcatttcgcttgtctgtgagccggcctggtctcccagagcagagaccctctgaggtccagcctgagttggggtctccgtgctgacccctgacggggactcaggacgtaccaggtctgggtcaggagtgacccccaaacctcgtgccctttgacaggcacccctgacttttgctaagtgggtggaggtgacatcacttacagcgggagtgatgggacagggtctgttggctgcactgtgctcccagggatctggggagaggctatatccctgggctttggcactgcagagctgtgtgtgtttgtgtgtgtgtgtgtgtgtgtgtgtgtgtgtgtgtgtgtgtgtgtgtttgcgtgcgcgcacatgtgtataagatctttttttattacatgaagcaagataactgttgctgtttccttttgggttttgtgttcaacagagtggggtacttcttccctcagacaacagaactctcccctttaaacacgtgctgtcagagggtgggtcttgggctcatgtctgtttgcacagccgagtcagaggaaacacagggttcttcataaaaacactgcacagcaggcgactgtccagagtcagcctgcaggacggcagcagccctgcccctcagagcacagctagggtgggctgctttgggatctcccgtcattccctcccagctggcagccggcggccggcccattccttggtgtgctggtcaggggggcgtgcgcctgctctgctcaccctgggaatgggacagaagctggcagctcggagaggacagggctggacccttgggtggcctctggctggaccatctcattgtcctcagacacagcctctcgggtctagtttcatttcctgaaaaacaagtgcacagaactagagcaggagtcgagagctacggcccccgggccagatccagccctgccacctgttttcacaccatgctcaagctgagtgggttttacattttttaattacttgaaaaaaaaaaagccaaaggaggtttcatgacccatgaaaattatatggaattcaaaaaaaaaaaattatatggaattcaaatttcagtgtccataaataatttcttgagacagggtctcgctctgtcacccaggctggagtgcagtgctatggcatggctcgctgtacccttgacctcccaggctcaagcgatcctcctgtctcagcctcctgagtagctgggactacgggtgtgtgccaccaagcccggctaatttttttttaattttagtaaagacagggtctttctatgttgcccaggcttttctggaactccatcttggcctcccaaagtgctgggattacaggctcgagccacggagcccagcctgtttttgttttttcactgataaagttttgccgggtgtggtagtgtgtgcctctagcgatttgggaggctgaggtgggaggatcgcttaagcccaggagtttgaggctgggctcaagtgatcaggaggtgaactatgatcatgtcattgcattccagcctgggtgacagagcaagaacctatctcttaaaaatatatatttaaaaagtattgggtgtggtggctcacgcctgtggtcccagctacttaggcatctgaggtgggaggatggcttgagcccaggagtttgaggttgcagcgagccaagatcgtgtcactacactctagcctgggtgacagagcccagaccctgcctctttaaaaaaaaaaaccaaaaaacatgtattggaacacagccatgcctgttcagtcacgtgctctccatgctgctttctgctccagagacccttatggcctgaaagctgaaaatattttctatcctttacaaaaaagtttgctgacctctgtcctggaaaattcatctcccaagttctcttccggcactggcgttcctgggtgtcctaaatttggcccctgttatttctgaactctgttttggctctgttccctcccaggagccaggacaggcacgttctctgcatcttgtcccctgacgcccagaggcttggctcggctcaggcattcttggaaatatctggctccaggaaaggcagaggcctcctgagtcggcccagagggaacctgccccaggtctgggggaggcctgacccagcagagtggcttttgccgatgggttgggccggtcaagatgtgctgaaagttgtcctcagaaggccactttgggattccttcctccagtattagagcaactgagagctgctcattgcaagcctgatgttttcccagttggccgggtccaccgggtgccctgggattctgggatctgggtggaaagtagggggcttgggggagtgtcctgggttctggaatccaggtggcaagtggtgaggttcagggagtggcttctgagccaccataggggtctctgtgggaggctctgcccatccaggagattccgcaggccctgccggcccagagccagcgtcttgcgcttgccgaggctacagccagccccagccgggtggaacagcccgtcgcctcctctcactttgttttggggccacctgggagtgtggagcaagggtagagagggaggaagtggctgccggccgctgcccagcacccttgtttgccttgggccctctgtgggctcctttttattgctcttcaatgaagccagggaaatggacttccttgcctcacttcagttcaacatgtctggaagtttggtattaaaattaagaaagtgtggaaatagagcaagaagagaaaaatctctccaagagataatagtgacctctgagctgggcgcggtggctcacgcctgtaaatcccagtactttgggaggctgaggcgggcagatcacctgaggtcgggagtttgtgaccggcctgaccaagatggagaaaccccgtctctactaaaaataaataaataaataaataaataaatacaaaattagccaggcatggtggcgcctgcctataatcccagctaaggcaggagaatcgcttgaacctgggaggcaaaggttgcagtgagccaagatcacgccattgcactctagtctgggcaacaagagtgaaactccgtctcaaaaaaaataaataaataaaaaataaaaatagtgacctctggccaggtgtggcagctcatacccgtaatcccagcactttggaaggaaggccgagatgggcagattgctttagcacaggagtttgagaccagcctggccaacatggtggaaccccatctctacaaaaatagaataaaatttaagaggtaatagtgaccttttggtagatcgaaacctggattgctttctttttctaaatgctgattcttttctttgtggtgtttgtgttctgtgccgatgtccctcccccagccctgttattgtgagtggaagaaggggaaagggttcgcccgctactgtgagcccctcctctcacgctgggtgtccttggagaagcctgcacttcttcattgtacgccagggctgggtccctccctggagtggttctgtgctgctgggatggggccaacccctcagatgttttctgagtgtcacacacaggtgtgtgcattcatggcctttgcgtgtcttcctgttgtggaggcaaaaatgtgaagaaccctagatgattttgggaccagggctccatcacctgctgttcattgcacaccggagcatccaggcatgggtggagagctcagacttccaggcacggtcgcaggggctggtctaaccatgttcccgcccgcctgctcgtcagaaccgcctgttgggagctgttatcatgataccatacctgggccctgggctatccgattctgacttaattgctccaggttggggccaggccgttgtttgctgttttgttgtttcttctgtgacgttagccactgggctaatctgagcccctcagttacaggtggagaaactgagacccatgggggtgcaaggacttgccgaggacccagagccccttgggggcagagctgaggcggggcctggctttgggtcccagagcttccagtccccttcccgctctcctaacagcttttttttttgagacaagatctcaccctgtcacccaggctggagtgcaatggcatgatctcggctcactgcaatcttcgctagctgcgttccagcgattctcctgcctcagcctcccgagcagctgggattacaggtgtgtgccgccatgcccagctcgtttttttttgtacttttagtagagatagggtttcaccatgttggccaggctgatctcgaactcctgacctcaaatgatccgcctgcctcggcctcccaaagtgctaggattacaggctgggatcacactgtgcctggccctagcagctttgtcctgtgccatccaacaacagatgaccgaagtctttgtttcttaacatgcattccatctgccttacagttttgccacctgcaaaacagaggacttgtcgcttttctggtaagctggaaatgtaatctggtagcaggaggcctgtggaagcttgcctttaatggccttgtgtctctttcatcctgtcctgagagccggagaacttggatgttgcacctaactcaaccttcctgttaacatacagttctgcaggctcatggatcatcagaaccacgtcctatctcacgcggctgtatgcttccgttggttcaggtgtttttaccttgacagtattttctcctcggtggcttttgcggtggttgcttttaatcagcattgactcttcaagaaaaatatttagctgctacatctcagaggagacagggtggaaagcatctgagacctgcaggctcagacttagaaccagaagtgccctcagagttcatccggccctgacccagcgggaaatgagttcacagagaagcgggagaactttgccccaggccctgccgttgctcataactgccccaggtccttacatttgctccaggtcctgccccaggccctgcagttgctcataactgccccaggtccttatatttgctccaggtcctgccccaggtcctgcagttgctctgtgtggtgggtgtgatctggagccctccgcccattgctgcacctggggcaggcattgctaattgatcccaggactccttcctgcggagcacgccctggttctccaggcagccgctgcctgtcagcctgcagtggttcgggagaggacacctgcttgcctggtctgttccaaatcttgcttctcatcccagcacaggtagggggtgctatgggaaagggatcctcagttggccctgtcactgctctatcagctggggacgtggcatcctagtgaaaacatcatggccgggcgcggtggctcacgcctggaatcccagcactttgggaggctgaggagggtggatcacttgaggtcagaagttcgagaccagcctggtcaacatggtgaaacccatctctactaaaaatacaaaaattcgccaggtgtggtggcgggtacctgtaatccgagctactcgggaggctgaggcaggagaatcgcttgaacctgggaggtggagcttgcagtgagccgagatcttgccactgcactccagcctgggcaacagagtgagacgctgtctcaaaatctcaaacaaacaaacaaacaaaaaacaaacaaacaaagcgtcatttatccagcacccctggggaaccatgctacctggtgttttatggtacctggcaaggtgcaggtgaagttgctgctcttgggcattgaacccgtcttgtttggggcagctcaggccccaggcagggtccgggttggctctcgttggtgtggccctggcccatccagacctatatttctgccgtcctgcaggtgatcaatgttgatgggacgaagaggcggaccctcctggaggacaagctcccgcacattttcgggttcacgctgctgggggacttcatctactggactgactggcagcgccgcagcatcgagcgggtgcacaaggtcaaggccagccgggacgtcatcattgaccagctgcccgacctgatggggctcaaagctgtgaatgtggccaaggtcgtcggtgagtccggggggtcccaagccatggctcagccatgcagacttgcatgaggaggaagtgacgggtccatgcctgggcataagtgttgagctcaggtgccccgacctggggaagggcaggacaggaaaggtgacagtatctggccaaggacagatgggaagggaccaagggagctgattagggagtggttatggactaggaatgtcggtaacaatggttagaaagtgactaacatttgttgagcacctgctgtgtgcccggccctggccgggagccttcgtgcccacagtgaccccgtctgcaaatgtagttccttgccctactcgcactggggagcaggacgcagagccgtgcaactcacaggtgccaagctcaggactccctcctgggtctgcctgggctgggctgtgcttgttgcccctgtggcccacgcatgtgcaccttccacctgaaagccaggatcttcaggacgctccccgaggaggtcgttgtctggcacaatgatttgtctcttcctgaaaaggtgacagagttacactggagagagcagcatccaggtgcggcagggacaggcctggggctcgcgggcagggactctgtgtcctgccggggtcccacactgcacctgcttgtcagaggcactcagtcaatctttgctgatgaaggatgagaggacagaggacgtgatgcttgctgctgcattgcctgcagtcctgggtgagatgcccgggttgactctgctgcccgtcgggtggatgtgatgtcagatccccggctttaaaatacgagggagctgggaattgagggagcaggttggggcagaaagcacagccccgtggaagcctggagctgaggcagtgtgggcgacccctggagcagtgagtgcttccttcatggccttcatcgcaccctgcagtcctcatgtaggggatgccatccatgaatttagttttcccagcctcctttaaaaacgcgttcatgctggggccggggcagtgcagtggctcacatctgaaatcccaccactttgggaggccgaggcgggtggatcatgaggtcaggagatcgagaccatcctggctaacaaggtgaaaccccgtctctactaaaaatacaaaaaattagccgggtgcggtggcgggcgcctgtagtcccagctactcgggaggctgaggcaggagaatggcgtgaacccgggaagcggagcttgcagtgagccgagattgcgccactgcagtccgcagtccggcctgggcgacagagcgagactccgtctcaaaaaaaaaaaaaaaagtacaaaaaaaaaaaaattagtctgggtgtggtatcacgcgcctataatctcactactcgagaggctgaggcggagaattgcttgaacccaggaggtagaggttgtagtgagcccgtatcgtaccactgccctccacctgggcaatagagcgagactctgtctcaaaaagaaaaaaaaaaaaagaacatttatgccaggtgtggtggctcatgcctgaaatcccagaactttggaagactgaggcaggaggatcacttgagcccagaaatttgagagtgtcttccctgggcaacatagagagacctcatctctaccagaaaaaaaaaaattagcccggcatggtggcatatccctgtggtcccagctacttagggggctgacgtggcaggatcacctgagtctggaggcagaggttgaagtgagctgagatcatgccactgcactccagcctgggtgacagacagagaccctgtctcaaaaaaaaaaaaaaaaaaaagcatttactatccaccatggaaggtgagactgacctgtgagtgattgttcaaagaacaaaaaataaaccccagagataagacaaaagggtgcctccatgggggtgtgatttaaagctgagaaattgggcttcttccccctcccctctcaccccgtggtttgctaaaggagatgggaaaaaggattctttttttggctgaaatatttaacactaaattaaagccaattttaacagcactttggttgatgagtgaaattaacagactggccaaaaataaacgaacggtctgtactatgtgaaaaagaggcagctttggccatgctgggccaatgtgagttttcagggttgctgggaatgtctgtgaatcggaggaagggcctagctgggactctcaggagccaaggccctgaggggcaacttgcctggtccctgccctgaggcgttcactgctttcttcctgggccagatcacaggcccggaggctggaccactgggctggcactcttgccgagctgctccctgacttcctgaccatgctcctttcagcagccttgctgcactttagtttccttgaatgaaaaatggggatgagaatagctcctacctccaaggtgaatggagtgagttcggacaggtgactccctgggaccagtgcctggcgcctgacaaggtccagtcagagcccgcactgctgttactgatacccttggctgtaccaggggagaacttggttgccattgccaggtgttctcccaccacccccactactgtccctgtttgatgtgtggcgggaataaagctgtgcacattggagcttttggcacatcctggctttcaggtgaaaggtgcgtgtgtgtttgagggtttagcctggccaacccagccatgaggtcggacctgacctgggggtgagtcctgagctcggcacccctgagctgtgtggctcacggcagcattcattgtgtggcttggccgcacccctttccctgctgggctgttgatgtttagactggagcctctgtgttcgcttccaggaaccaacccgtgtgcggacaggaacggggggtgcagccacctgtgcttcttcacaccccacgcaacccggtgtggctgccccatcggcctggagctgctgagtgacatgaagacctgcatcgtgcctgaggccttcttggtcttcaccagcagagccgccatccacaggatctccctcgagaccaataacaacgacgtggccatcccgctcacgggcgtcaaggaggcctcagccctggactttgatgtgtccaacaaccacatctactggacagacgtcagcctgaaggtagcgtgggccagaacgtgcacacaggcagcctttatgggaaaaccttgcctctgttcctgcctcaaaggcttcagacacttttcttaaagcactatcgtatttattgtaacgcagttcaagctaatcaaatatgagcaagcctatttaaaaaaaaaaaagatgattataatgagcaagtccggtagacacacataagggcttttgtgaaatgcttgtgtgaatgtgaaatatttgttgtccgttgagcttgacttcagacaccccacccactcccttgtcggtgcccgtttgctcagcagactctttcttcatttatagtgcaaatgtaaacatccaggacaaatacaggaagactttttttttttttttttgagacagagtcttactctgttgcccaggctggagtaccgtagcgtgagctcagctcactgcaacctccgcctcccaggttcaagcgattcttctgcctcagcctcctgagtagctgggactacagacatgcaccaccacacccagctaattttttttatatttttagtagagacagggtttcatcatgttggccaggctggtcttgaactcctgacctcaggtgatctgcccgcctcggcactcccaaagtgctgagataacaggtgtgagccaccgttcccggcactaggaaaacttttgccttctaaagaagagtttagcaaactagtctgtgggctggccttctgattctgtaaagaaagtttgattggtggctgggtgcggtggctcacacctgtaatcccagcactttgggaggccgaggtgggcagatcacctgaggtcgggagttcgagaccagcctcacccacgtggagaaaccccgtctctactaaaaataccaaaaaaaaaattaaccgggcatggcggcgcctgcctgtaatcgcagctactcaggaggctgaagcaggagaattgcttgaacctgggaggcggaggttgtggtgagctgagatggcaccattgcactccagcctgggcaacaaaagtgaaactccgtctcagaaaaaaaaaagtttgattggtgtaaccaaagcgcatttgtttatggattgtctgtggcagcttttgttctgccgagatgagttgtgacagatctgtatgggctctaaagcctaaaacatgtgccatccgcccctttacagaaaaagtgtgctgacctctgttctaaagtattggacaactacaatgtttgctcatttattattctatgatttgttttctgctttttgttgttgttgttgttgttgagatagggtttccctctgtcactcaggctggagtgcagtggtgtaatctcagctcactgcagcctcgacctcctgggctctagtgatcctctcatctcagcctccctagtagctgggactacaggcacacaccaccactcctggctgattttttttttttttttttttttttgtggagacagggtttccgcatgttgcccaggctggtttcaaactcctaggctcaaacacccacctcagcctcccaaagtgctgggattacaggcgtgagccaccatgcccagcctattctactgtttgtattacatagctttaaaagattttttatgactttaagtcacaagggttctttgtagaaaaaaatatatatataggaaagtataaaaagaaagtaaaaattgtccataacctctccagccagagacgaccgttgctgacacctcagcatattgcctttaagtcttttttctctaagatagcatttctcttcatcacagtcatatgctacgcagaattctgtatcctgattttttcacttgacattacaacaggtatttgatggcgctgtgacaaactctttggcacaatcttttaaatgtatgaaatactccactgcacagatgtttgcttttaggcttaactgttcttttattttgcgtgtgctggttacagccgggcacagtggctcatgcctgtaatcacaacactttgagagggtgaggcaggaggatcacttgagcccagaagtttgagaccggcctgggcaacatagtgagaccccatctctacaaaaaacttttttaataagtcgggcgtagtggtgcatagctgtagtcccagccaccaaggaggctgagttgggaggattgcttgagccccaggaggttgatgctgcagtgacctgagattactccactgtactccaacctgagcgacagagcaagacttgtctggggaaaaaaaaaaaaaaatatatatatatatatatatatatatatacatatatacatacacgcacacacacataatataaaaatatatatttataaatatataatatataatataaaaatatatatttataaataaaatttataaattatatttataagtaaatatataatatataatataaaaatatatattatataatatataataaaatatataatataaaaatatatatttataaataatatataatacatacttataagtatatatttaaaatatatgtaatgtatattttttaatgtatgatatataatatacatttataaatacacatttatattattttatataaaatatatataaaatctccaagttgctttttccaaaaaggtgtcttgctgcatttcaaacattcatttaaaaacttgaatgctggtgatctggtccagaatgtgttcagtagctgctgccagtggccaagcatctcgggagatgtctacaaaacacgctggttctggcctggcgtggtggctcacgcctgtaatctcagcactttgggaggctgaggcaggtggatcaactgaggtctggatttcgagaccagccttgccagcttggtgaaaccccatctctactaagaatacaaaaaaattagccaggcgtggtggcatgtgcctgtaatcccacctacttgggaggctaaggctggagaatcgcttgaacccagggggcagaggttgcagtgagccgagatcgcaccattgcactccaggctgggcaagaagagcgaaactccgtctcaaaaaaaaaaaaaaagatgctggttcctaaaatgtggcccttttcctcctcacctgctgccagaccatcagccgcgccttcatgaacgggagctcggtggagcacgtggtggagtttggccttgactaccccgagggcatggccgttgactggatgggcaagaacctctactgggccgacactgggaccaacagaatcgaagtggcgcggctggacgggcagttccggcaagtcctcgtgtggagggacttggacaacccgaggtcgctggccctggatcccaccaaggggtaagtgtttgcctgtcccgtgcgtccttgtgttcacctcgtatgagacagtgcgggggtgccaactgggcaaggtggcaggctgtccgtgtggccctcagtgattagagctgtactgatgtcattagccttgatggtggccaggactggtagggccctcagaggtcatggagttccttcgtggagcgggtgctgaggctgtatcaggcacagtgctggctgctttcacctgggccgtctcaccgaagtgtccatggagcctgcgtagggtgggtatctgtgtcgattttacagatgcagaaacaggctcagagaaaccgagtgacttccctaaggtcacatacccagttagagcagagctgggccaggaagtgctgtctcaggctcctgaccaggtctccttgctttgcactcttgccaaaaccatgatccagaactgactttgaggtccccggacctcaggctcctccgaaatggcctcttggaggctgctgagccacagcttaggacccacctcgagaggcaaatgtgctttgagctgccaggcgtcctgggggccctgccttgggcacggggttcagacaggccccagatgtgtggggcgtctttctggacttgagttttcttttctgtgtggtggacacagtgctcaccccttaaagcacctgtgatgtgtgcagcagcccaatccctgcctgtcgcctgttctgctagggaaggaaggaagacttcaggatggcaggacaacagaaagaggtccaggttttagagcaagggcaggtcaaacttagaaaattctggaatgaggatgtgcatttcctcttctggatctgctaaaagaagagggaaggaggggctgctgggggaggagcccagagccgagtttacatccggatcccgcaaggcctcccctgccctgaggtcttgttttgtgatgtgcttgtgtccatcctggtttctgccgtgtccccaacatccggccaagcttaggtggatgttccagcacacactcaccctgtctgtgcacctgtttttgtgtccgtaagtgggtatttactcgccttacgagtgagccactgtgggaattcagggaggtggcgcagtgaccacccctggagggatatgtgtgtggcaggggtcgagggtctcgcccttccctgcttcctgcgcgtggctttctccaggacggggagggctgagctgaagaggtggggacagttgcgtccccccgccacccactgtcctgcggtgagagcagactcactgagcctgcccttctcccttgtgccttccagctacatctactggaccgagtggggcggcaagccgaggatcgtgcgggccttcatggacgggaccaactgcatgacgctggtggacaaggtgggccgggccaacgacctcaccattgactacgctgaccagcgcctctactggaccgacctggacaccaacatgatcgagtcgtccaacatgctgggtgagggccgggctggggccttctggtcatggagggcggggcagccgggcgttggccacctcccagcctcgccgcacgtaccctgtggcctgcaagttccccaacctggcaggagctgtggccacacccacgactgcccagcagcctcaccctctgctgtgggagttgtccccgtccacccctgggtgcctttgctgcagttatgtcgggagaggctctggtgacagctgtttcctgtgcacctgctgggcactaggtcccagctaatccctgtgccaggactctaatttcaccctaacacacatggtggttttcattgctggggaagctgaggcctgagcacatgacttgccttaggtcacatagctggtgagttcaggatcccccagagataccagggccagcactcgatccccacccagccctgaaccccaccatgtgctgggattgtgctgggagtgtccacacgcctgggaccccagggctggtgctctcatctcctttttccagatcatgagaatgaggctcagggaagtttgaaaaaaacctatcccaagtcacacagcaacaggagcaggatttgaacccagaaaaggggaccgcacactctgttctgctagagtagttagctgtcctgggtgatatggcaggtgacaggggcaactgtgcttaacaaaggaacccccatcccccctgccaagttgggagactagaaggtcaggggcagaagctctgaagggccaggtgcagtggctgacacctctaatcccagcactttgtgaggccaaggcgggcagatgatttgagcccaggagttcaagatcagcctgggtaatgtagtgagacgccatctctacaaaaaaattttttaaaaattagctgggcatggtggttcatgcctgtagtccaagctacttgggaggctcaggtgggaggattgcttgagcccaggaggttgaggttgtggtgagctgtgatcatgccactgcactccagcctgggcaatagagtgagaccgtctccaaaaaaaaaaaaagaagaagaaaaagaagctctgaggctccaagtccccaggcaccccttggcttgagggcagacaagggaggagagggtcacctgggcagccctgacttttgtcccctggcaaagggaccttcagtgaccttggccctaggagagcctctgagcacgtcagccatgtcgaaccgctcaggaagggcagcaagaatttggcttctgacctctgcctctcctactcgccatctgcactgggtgtggttgtgcccattttacagatgaggaggctggggcatcgaccagctgaatgccttgtcccaggtactgcgtaggcagagctggcagttgaaccccgtgtcctggttgtcgctgggggtgggctgcaccctgacttgtgaggccagtagcaaggtttgcacgtgacttcgtgaccgtcacccagctctgcagcacatcccgtgacccagctcatccaggccgcatgcaaacctgttgccaggcgagaaaccagtcaccgcacagctgtggttgcctgaaatgattaagctcattaatcaccccggagtgaggacagactcagatgaaaaccagcaaaagccctggaaactcatgtgaccctgccaatgagggcggccatgtgcattgcagcctggccgtcactcctcggtacgtgttttggacttaaacgctccggatgtttactgagtgcttgattaataacatggaaggcctggtctcattgctgtgggagtgaaggatgcacagccaggcctgacatgatgagaacaagaacctggagtctcgctgcctgggtggtaatcctggccctgccacttagcaactgtgtgactgtagccaggtcacttaattttgctagatcctgcctgcgcttcagtggatcttgctggttttccaaggtggccaaacactttaaggcattcatgtggtcgctaggctgcagggttgaaccctggctcaccccgcagggcgccgtgtgctctgtggcctggctgtgcctttgctgacaccgtgcccgtgtgtgttcatgcaggtcaggagcgggtcgtgattgccgacgatctcccgcacccgttcggtctgacgcagtacagcgattatatctactggacagactggaatctgcacagcattgagcgggccgacaagactagcggccggaaccgcaccctcatccagggccacctggacttcgtgatggacatcctggtgttccactcctcccgccaggatggcctcaatgactgtatgcacaacaacgggcagtgtgggcagctgtgccttgccatccccggcggccaccgctgcggctgcgcctcacactacaccctggaccccagcagccgcaactgcagccgtaagtgcctcatggtcccccgcacctcactccctcgttagatcaggctggttctgggagctgacgctgaaaggagcttctcatctggggttcctgggtgtacatagatggttgggtaggttgtgcactgcacaagctgcatgatgctacctgggggtccaggtccaggctggatggacttgttgcttcatcaggacatagataaatggccaaaactcctcagctggaaggtcctgggcaggatctttgggtgtgaaaaccagtcacaggggaagggtgcttgctcatactgccagcacagtgctgagtgctttccatagcgctcgtttactcctcaagcctggagggtggggagtagcatggtcccatttcacgtacaaggaacccgatgcacagagaggtgtggcaacccatccaaggccatacaactggggtgggttgagccggggttgactgtggcaggctggctcaagagtccctgctcctgaacccttgccaggcagcctggcatcagctcggggaatttttgccctgacccttggaagcaagtgggcctctttgttctcatgtcagtgatgagaagagtgactttcctatggcccctctggagtacaggtgtttcctgttggcgggctcttcccccatgacatcagcagcgagctggttatgattccctacgcagaacttgatagtttataaagctctttgtcatccaggccccgttggagtctcacgcagacctggtcgcaggcggggctggtcttgcctgtcccagctgcatggatggggaacttgaggcttgcaaaggttaaggggctgttcgaggcccaggctggcaggagatgggcctgggccagagtctgggacttcccatgcctgggctgtctttggtcctgttgctcaccatccctccctggggccatgaccttagagagccaaatggaggtgcaggtaacccacggcaaggaggggttgccatgactcagagtccccgtcctgtggccggcagtacctggtgcaacgacttggatttcagaccagccactgtagcccgctgacggtgcgctcgaagtgccacagcttctgaagccaggcaggactcaggccaggagactctgttagctgttgagagggagaggccaacggatgttctggttctgctagagagctggttcttcggatcctggtaccagtgcactgagaggaggcccagcttgattctggggctgccttgtggtggcatgtgctgctcactgacaccctcgaggagtgtcttctctcgggcttgttgactgtgcccggttttccgcagttcactggtgcacacataggcacatagcaaaccgcacacacagtcgtgggtatgagtttcactacattccaccaccagtgttcactaccattacctgccttccgtcttaagtgttcatcatttaaaaataaatttattgggctggacgcggtggctcatgactgttatcccagcactttgggaggctgaggcgggcagatcacctgaggtcaggagttcaagaccagcctggccaatatggtgaaactccatctctactaaaaatacaaaattagctgggcatggtggggcatgcctataatcccagctactcaggaggctgaggcaggagaatggcgtgaacccgagaggcagagcttacagtgagcccagatagcaccactgcagtccagcgtgggcaacagtgcgagactccatctcaaaaaaaaaataaataaataaaagaaaaataaatttatgatctatttcaaaaataacacatgtactttgaaacagcagagacacatatgacacggagaatgaaattccccatagcgcacccccaagagacagccctggtccccccgtctttcccgtggacctccagcggggcagatgctgagccgcctgttgtcgagtggcgtgctatcccgtcctccagctcctctgtggcttacagacacccacctgcagccctgtctttgcctcctctagcgcccaccaccttcttgctgttcagccagaaatctgccatcagtcggatgatcccggacgaccagcacagcccggatctcatcctgcccctgcatggactgaggaacgtcaaagccatcgactatgacccactggacaagttcatctactgggtggatgggcgccagaacatcaagcgagccaaggacgacgggacccaggcaggtgccctgtgggaagggtgcggggtgtgcttcccaaggcgctcctcttgctggtttccaggctgctgcccctgtccttagcagagggaggaaacagaggatggctctgggtgaatgatgacttgggcttcgattatgtagtcacagggtatgaccctgagatgcgtggaaccccgagactgtgattatatgtagaaactgggtttccccgttgtttaagtagtcatggtggggtcagaccccacaggacttttgtcttttcaagaaagaaaatggtcgtgtgtcatgcaggggtagttggtactggttaatccaggtttatcctttattttgtgggaactgtacagtcatttctgctacaatgctgtatatgctcttctgaaagacacctatgcaaaatcgcacagtaaaaatgacacaactcatagggaaagcggggccagggcacagccctcaaaatctccatcaatgacatgtaagaaaagagaggaacctgggaaatagcaaagtgccttttgcacattaaatggttagctatatcccacaatactgtgcattcgtaaacgttaatgctgcaataaatacggcacttcaccttgggaagatctggagttggcttatgagtgtggaagggtgtagcgcatgagtttttgtgaaacactggaaggaggattgtgggaaatcaaatggaaagttctcaccccaggcgtggagaagagtgggtcatggccccagcagtgagcccagggaggtcagagacggaggtgtgtgtgtgggtgtgaccctgcgcagttccctgccggctgtagttttttgcattcgcttaatgtttctcgtggaggaaattgtgcatgagcaaatgtgaaaccgtgctgtgctcaaattgtcctaatacatcattgcattggaacagattggcttttttttttttttttttttttttttttttttgagatggagtctcactctgtcaccagcctggagtgcagtggcatgatcttggctcactgcaacctttgcctcctatgttcaagtgattttcctgcctcagcctcctgagtaactgggattacaggcatgagccaccgcggccggccagatttgcatttttgaaacaactgctaggctgggcgcggtggctcacacctgtaatcccagcactgtgggaggccgaggcaggtggatcacctgaggtcaggggttcgagaccagcctggccaacatggtgaaaccccgtctctactgaatatacaaaaatcagctgggtgtggtggcgggtgcctgtaatcccagctactcaggaggctgaggcaggagaattgcttgaacccaggaggcagaggttgcggtgagccgagatcacaccattgcactccagcctgggcaacaagagcaaaactccatctcaaaaaataaaaaatagaaaaacaagtgctgtagcggaagtgagcactttgcggagtcaggcttgtgtggcctgttccacaaatgatgtgctcacggtggcctcaggcccacctggagtctgcagcatggggcacaacaggttcattagtgtagaattccaggacaggcctggctcctaagcagccttcttttacaaaaactgcagagcccgcctgtatcctagcactttgggaggccgaagtgggtggatcacgaggtcaggagttcaagaccagcctggccaacatggtgaaaccccatctctactaaatatacgaaaattagctgggtgtggtggcacgcgcctgtagtcccagctactcgggaggctgaggcagaattgcttgaacctgggaggtggaggttgcagggatctgagaccatgtcattgcactccagcctgggcaacagagcgagacgccatctcaaaaaaaaaaaacctacagagccacacggcctctttctccaccgagtgttggtgtgggagcttgtgttattgtggtgaaatcttggtactttcttgaggcagagagaggctgagcgcctggagagactttcacatgggtcgccatgtccgccgtcggtttcgctgttgtgctccccatctgaaggctggtgccgtccagacaggctggacgcccctttccaccagatccttcctcccgcagcagtttctagttacgttgtactgtgaggtctgtgtccttggttgatggcaaaagtcagccgaattgaaattcagagccatgcctggctccctggagcttctctcctgggcagctgtgatcattgcctctgctgtggtgtgggtggtggaaatggattcctttcatcttgcttgctacaggtgactgtcacgtggagtcctttggagagagggacgtgttaattgatggatgtggctcccatgctgagaaagctcctgggcgtacattgccttagagtttcattggagctgcgttcttttatggtgtctgctaggcagaagtgatgaagacttggaagaaaacccagaaggttttccacttaatttggaaaatgtgcttttcccctcctgtgtcttttgctaaggtccagcctcctgcagcctccccgctctgtggactctggctttgattctttattaggagtccccctgctcccccaaaagatggtgtctaaattatcatccaattggccgaggttttgttttctattaattgtttttattttttattgtggtaaatatatataacataaaatttgccattttaattgttttgttattgttgtttttgagacagggtctcaccccagtgcccaggctggagtgcagtggtgcgatcatggctcactgcagcctcagcctccagggctccagtgatcctctcacctcagcctctctagtagccgggactacaggcatacactaccacatctggctgattttttgtattttttttttattgtagagacccgctatgttgcccaggctggtctcaactcctggactcaagccatcctcccacctcaccctcccaaagtgctgggattacaggcatgagccacaacacccagccattttaatttttttttttttttttgagatggagtctcactctatcgcccaggctggagtgcagtggcgtggtatcaactcactgcaacctctgcctcccaggttcaagcgactctcctgcctcagcctcctcccgagtagctgggattacaggtgcccatcactatgcctggctaatttttgtattttttagcagagacggggtttcaccatgttggccaggctggtcttgaactcctaacctggtgatccgcccgcctcggcctcccaaaatgctgagattacaggtgtgagccaccgtgcccggcctttttttgtttttgagacagggtcttgccctgtcacccagactggagtgcaatggtgggctcttggctcactgcagcctccgcctcccaggctcaagttgtgcacctccacacctggctaactgtattttatgtagagacagatttcaccatgttgcccaggctgggcttgaaatggactcaagcagtccacccacctcagcctcccaaagtgctgagattacaggcgcgagccaccgcacccagcccattttacctattctgcagttgacagttcagtggcattcagtcagttcacgaggtaaccatcactgccattcatctccagactacttcaccttctcggcagatgtccgaaactgtccgcattgaacacactcctcatctccctctgacagccaccattctactttgtatctctctctgccttctctaggtacctcatgtaagtggaattataccaatatttgcccttgtgtgactggcttctttcatgtgacatggtgtcctcaaggttcatctgtgttatagcctgtgtcagaatttccttccttaaagcctgaataataacccgttgtaaaggctgggcgcggtggctcacaccctctaatcccagcattttgggagtccgaggtgggcagatcacttgaggtcaggagtttgagaccagcctggccaacatagtgaaaccctggctctactaaaagtacaaaattagctgggtgtggtggcgcgcacctgtaatcccagttactcaggaggctgaggcaggagaatcgcttgtacccgggaggcagaggttgcagtgaaccaagattgtgcctctgcagtccagcctgggtaacagagtgagacttcctgtctcaaaaaaaaaaaaaatcatcggatggatggacggaccacttcttgttatttatccatccacgggtgctaggtttcttccacctttggttgtcgtgaataaggccactatgaacatttccttccgtggtgaaggttttgtactagtgaggaaaaggcgtgtttgtggtgttgcataggattctggtaagaaagtttgcactaaccataagtatttgtactacattaaaatgaaagctcaggggccgggcgcggtggctcacgcctgtaatcccagcactttgggaggccagggcgggcggatcatgaggtcaggagatcaagaccatcctggccaacatggtgaaaccccgtctctactaaaaataccaaaaaactagccaggtgtggtggcgggcacctgtagtcccagctacttgggaggctgaggcaggagaatggcgtgaacccgggaggcggagcttgcggtgagccgagatcgcttcactgcactcgagcctgggcaacagagcaagactccgtctcacgcaaaactctgtctcacgcaagactccgtctcaaaaaaaaaaagagttcagggtttatgaaactggccagccgcgtaaagtttgctgtgttgtttttgtgcccgggaggagtgtggccagggtgtcacgtcacacagtacacgtttctcagatggtggttctccagactgctgtcccaaagtctgtttttgcatctggttcccacagacccaccctccacggtgagcctgattttggccagggtagctggaatcttgcttgtctttcagcccggcagctgtaccagtccagggtccacagctagtggcttttaggaaggaatttgttcagttggctttgacacatggccccctagggtccacagctctgtagtgatgtggatgttgttatctacaaagacacatgatccttcgtgtccagatgaaagtgatgatgtctttgcagctgcccagcaaggctgtgtgtgtgtgtgtgtgtgtgtgtgtgtgtgtgtgtggtgtgtgtgtggtgtgtgtgtgtgtatgggggagggaggcaccctttccatctgggggtgtgtgtgtgtggggtgtgtgtgtgtgtgtgcgcgtgtgtgtggtgtgtggtgtgtgtgtgtgtatgggggaggcaccctttccatctgggtccaagagactgggcctggggaagacgcttctttttatctacttagagactttgttttatttgtatttttttgagacagggtctcactctgtcacccaggctggggtatggtgatatgagcatagctcactgcagcctcggcctcccaggctgaagcgatcctcccacctcagccttctgaatagctgggactgtaggcgtgcgtcaccatactgagctattgttttttttgtttggttggtttaattttttttgatacagatggagtcttgctatgttgcccagactagtctcaaactcctgaactcaagtgattctcccacctcagtttcccgacattctgggatcacaggtgtgagccactgctgtctccctgttttattaactgctgaaagacctagataaagaaagtctgaaaagacttactatcagagcaccatcctaagatgattccctctgactcaatggagagggaggggagcttttccttcaggcctgggtggcaggagcccaggtgctccaggccccatttgccccaggccaaatcactcgggaacttggatgcagctgtctttcagggtaacccaaaggaaccagatccccgcaggcagtaggcttctgggctgtcctctcctcctacgtcagctcagtaagagcccttcgaagggatgctgtgtcggaggccccaaaagcccaggctcatccctgagatgcacagggtgggctgggcttaggcagcgctcgagcatctcctggacggtgaccccagagagtgtggagacggagagtccttgagagtcactgagagacgtggctgccctgccttcccaagaggggctctgagtcattccccacactcacctgcccctacccaccctcacctggcccccagcctcacctacccccacatctgtaccgatccctttacccgcaccttccctacccaccctcacctcccctgtaccttcacctcccccactcacccgcccctgcaccctcacctgtcccccaccttcacctaacccccaccctcacctgccctcccctcacctggcctccttccgttggggaaggggttgtaaggggcggcccccaaactgtctgtcctggtgccctgcagagaaaacagtacgtgagggccgcagtccaaaagcttgagtcctggaaggtggaggagacagggatgtgttgggaagggccccatggtcttggatcccttctcgactgtcaatggggccttcatgggagcgccagtctagtgatgcacagctgggtgcccggcgggtggctgaggaggcctaaagtccgaggcggcaagagctcttccagaggctgttgtcctaatcgctctggcatactcaggcgggcacgtagttaggagctgattggagaggagagacccccacaccaatactgggatttgactttcaggctaaacttgagaagtgtggcctctgctgtcctgccagagctctccagccagtgcccagggctctccagccagtgcccgggggtctccaccagtgcccgggggtctccgccagtgccaggggtctccgccagtgcccaggggtctccgccagtgctcaggagtcttggtttctttgtcttacagccctttgttttgacctctctgagccaaggccaaaacccagacaggcagccccacgacctcagcatcgacatctacagccggacactgttctggacgtgcgaggccaccaataccatcaacgtccacaggctgagcggggaagccatgggggtggtgctgcgtggggaccgcgacaagcccagggccatcgtcgtcaacgcggagcgagggtaggaggccaacgggtgggtgggggtgctgcccgtccaggcgtgcccgccgtgtcttctgccgaatgccagcctctcacaggctggggagactttccaccctggggatccaatgggtggctttccagggtcccaaaagcaaacacaggctctttcacagcccctccaggaaagcagaaagccccaagggctggaagggaagggggagctctgctgagaggttacaaggcagcgctggccgacgggagttgcagttgataggttttgtatcatccttgttaaacttgaaccctgtgcagaaatcccttccacggcatgggggctgcctgttgactcgctcctgttccaccacagggagctcctgggcttcttcctcccagaggcccccgacgctcccacctgttggtcgtcagagcttctggttggtgggaaggcacccaggaccttgaggtctccagagagaaaagccagggaaagagggagaccgaaacccatgtgacatgaaactcaggctccaaactgagcacgggaacgtttggggacaggagcgcgatggccttcctcagatagctggggggctggcatgaagacgggagctacagccagcacaggtcctgggccgggagcccagagattgagccctgactctgtcacttactggccacgtgaccttgggcgggtggcatagcctcttggagactcagtttcctcattggtaggagtgacggccacagtggtgcggcctctgcagcacacggggggctcggtgggcggaagccccgggtctataaggcggctgtgcaggagccagccgagctggtctcccaacagccagggctccggggtccttagcagctgtggggggcctgcacctgtttcccatggctgctgtcagaaattaccagaagccaggtggctgagagtaatggacacttgttctctcacagttcctgagggctgaagcccgagatcgaggtgtgggcagggccctgcgccctctgaaggctctgagggaacctttgggcttctggtggctccaggcaccccttgacttgtggtcctgtcactccagtctctctgtctggctgcacatggcgtggcctcttctgtaccattgaaggacacttcagttggatttagggcctaccctcacccattgtggtcgtatcttgatccttcatgacatttgtaaagaccctgcttccaaataagctcacattctgaggttctggggtgagcgggaatttggagagcattgttcaactagtatagaatgtgacctgtcagcctcgggcagccctgagaggcaggggctttccacagcccagctgggtgccctgggctccgtgctgtccgaggagacgccatccccacacccgtccttcacccgccaccctcccgcaggtacctgtacttcaccaacatgcaggaccgggcagccaagatcgaacgcgcagccctggacggcaccgagcgcgaggtcctcttcaccaccggcctcatccgccctgtggccctggtggtggacaacacactgggcaagctgttctgggtggacgcggacctgaagcgcattgagagctgtgacctgtcaggtacgcgccccggggcctgccctaaccgcagacacccggccttcattgtcagtaatggcagcagctgccacattgtccgagacctgccgtgagcccagtgccgcgccaggggctttgtgtgtagcgtgttttgtcctcacactgacagctgtaggctggggttctgagtgagccccacagggcagaggcagaaaatgagtctcagagagggtgagcgagctgcttggggccccacagcaggagatggagcaggactgcagcctagcctctgcccccagcacctgcgcaagaagctgctctgctctggactgtgttaggctgcgagggctggagagaaatgagagttggtgcttagagagggggcgcaggtccccatggcttttcctcttatgatgaggtagatgggtgaagggaggggccatgcttgcaggggccagtgaccgaggcccgccgttggaactgatggccttcatcccgagcccagcccaggtgggagcagggctttccgagggcttgtcttgggtcggcctgcttccagggactctgctgcagctcccacccctgtccaaagcatggaatcccccaggctccctggcagtcctgtcaacctctgtcctcccaagctgagtgtggggcaagttctggaggtcagcactgctcaggggggcccacgggctgcttgcaggggccaaccgcctgaccctggaggacgccaacatcgtgcagcctctgggcctgaccatccttggcaagcatctctactggatcgaccgccagcagcagatgatcgagcgtgtggagaagaccaccggggacaagcggactcgcatccagggccgtgtcgcccacctcactggcatccatgcagtggaggaagtcagcctggaggagttctgtacgtgggggctggcagtggggtgggcagggtggcctctaaacccgacccctggaggaggctggaggccagtgcaagatcctgtgtggcctcagccaggcggtggtctctgccagatgccaactgttgcccgctggggttcagcgacatgtccgaatgtcccgaggcctctgaggttgttttcttttgccgcagaacaaatcaccacgaacagcgttttaagacaacaccaactctttttttttttttttttttgagtcaggatcttgctctgttgcccaggctggggtgccctggtgcaaacacagttcactgcagcctcgacctctgggcttaattaagtgaacaccttgcctcagcctcccaggtagctgggactacaggtgggcaccaccacacctggctaatttttttttgtagagacggggtttccccatgttgcccaggctggtctgcaactcctgggcacaagctatctgcctgctgtggcctcccaaagtgctaggattataggtgtgagccactggcctgacaacacccacggattgtctctcagttctgtaaggcaaagtccaggcacagcgtggctcacctgggttctctgctcagggtctcacggggccagaatcaaggtgtcaggaacgctgggccctcagcggaggctctgtggagaaattagcttccttgctcactcagcaggtagcagttgtgggatcgaggttctgttttctctctggttattggtcggggaccactctcagctcctagaggccaccacaggtccttgccccgtggccctctctgcctcagcagtgggggctccctgcgtcagtccctcccacaccttgagtctctctgatttgcttctaaagggccctgtgattcggctcagccacctttagattaggttagcctcccctttgatagactccaagtcggctgattaataaccttaatcacatctgcagaatcccttctgccacataaggtcatgacgccgtgctggggactggggtgggaaattacggggtcatttaggattctgcctgccactgccttgctgtgtcccagggcttgggggaggggcctccacagctgggaccacagtccttcctcccctccatggtaaccatctgaggattacttgagaccagcctgggcaacatggtgagaacccatccctacaaaaaatacaaacaaaaagggaccaggctgggcttggtggctcatgcctataatcccagcactttgggagaccaaggtgggctgatcacttgaggttgggagttcgagaccagcctgcccaacatagtgaaatcccgtctctactaaaaatacaaaaattagctgggtgtggtggcaggcgcctgtattcccagctactggggaggctgaggtgggagaattacttgaacctgggaggcggaagttgcagtgagccaaaattacgccactgcactccagcctaggcaatagagtgagactccgtctcaaaaaaaaaaaagggccaggggtggtagtgacaaagagaccctatcccaaaaaaaccgaacactgaatccttgagactgagtaaggacactgtgaaatttttctgggtggggcagggaacagagcgtcttctgtcatttcttccacctgggtgtggtcagctctccctccaagctgcctcctcttcttctcattgtccgggtgttggacacatttggttaactggatagaataacgcgagttcccagggacttggtccatttgctattttattttattttattttattttattttatttatttatttatttatttatttatttattgagatggagtttcgtttttgtcgcccaggctggagtgcagtggcgcgatctcggttcactgcaacctctgcctcccaggttcaagtgattctcctacctcagccttccaagtaactgggattacaggcacccaccaccataccaggctaatttttttgtatttttagtagagacgggttttcgccattttgcccaggctggtcttcaactcctagcctcaggtgatccacgcacctcggcctcccaaagtgctgggattacaggcatgagccaccacgcctggcaccatttgctattttaattcccatgtgtattagtgtcccacggctgctgtaacaaatgaccacaaactggatggcttaaagcaacagaaatggattcccccaatgtgctggagaccagaagcctgcgaccaaactgttgggagggctgtgcttcctctgggggctccagggaggatctatttgttggcccttccagtgctgtgggtgccagcgttccacacttgtggatgcgccgcctcaacctctgcccatcttcatgtgtccatctcctttgtgtctgcgtctttacctcttcttcttgtctgtgttgcctcttataaggacgtttgtcattgggtttagggcccacccaaatcatccgagatgacctcgtcttgagatccttaacctgcaaagaccctttttccaaaaaaaggttatgctcacagattctaggccttaagacatgggtgtatctttctggggggcactatccaaccccttatacaatgaaagacgggaagagggccaggtgtggtagttcacgcctgtaatctcagcactttaggaagctgaagcgggaggatcacttgagcccaggagtttacaagtagctaggcaacatgatgagaccccatttctacaaaaagtgaaaaaaaaaaaaaaaaaaaaaaagccaggtgtggtggctcacacctgtaatcccagcactttgggaggctgaggcaggcagatcacgaggtcaggagattgagaccatcctggctaacacggtgaaaccccgtctctactaaaaatacaaaaaattatggccgggcgcagtggctcccgcctgtaatcccagcactttgggaggccgaggtgggtgaattacaaggtcaagagatcgagaccatcttggctaacacggtgaaaccccatcaagatcacaaggtcaagagatggagaccatcctggctaacacggtgaaaccccgtctctactaaaaatacaaaaaattagccgggcatggtagcgggcgcctgtagtcccagctgctcgggaggctgaggcaggagaatggcgtgaacccgggaggcggagcttgcggtgagccgagatcgctccatgccactgcactccagcctgggtgacagagtgagactccgtctcaaaaaaaaaaaaaaaaaaaaaaaaaaaagaaaattagccaggcacagtggcaggtgcctattgtcccagctacttgggaggctaaggcaggagaatggcatgaacccgggaggtggagtttgcagtgagccgagatcatgccactgcgctccagcctgggcgatagagcaagactctgtctcaaaaaaaaaagccaggcatggtggtgcatgcctgtagtcccagctactcaagaggctgaggcaggagggttgttcgacccacggagatcaaggctacagtgagccatgatcgcaccactgccctccagcctgggtgacagagtgtgaccctgtctcaaagtaagtaaataggaggagagacaagtgggcagttcagactgatggtatgggcacagtagagactggtgcagacaggctggcctgtgatgtcaagcaacttctgtaattgtttccggcatccatttgtgtgtcaatttccgtgtcagtaggaagactctgtaggctgccaagaggaataagtgggaggatcctcccagagaggccgggcctgcaggagggccagttctcatgagttctcatttggcccctaccctccaggctgtggttctgaggtgggagacagagcctgacctctgtttgtcttgttttgtctttgcagcagcccacccatgtgcccgtgacaatggtggctgctcccacatctgtattgccaagggtgatgggacaccacggtgctcatgcccagtccacctcgtgctcctgcagaacctgctgacctgtggaggtaggtgtgacctaggtgctcctttggggtgatggacaggtacctgattctctgcctgctaggctgctgcctggcatccttttaaaatcacagtccctgtggcatccagtttccaaagctgattgtgtcttcctttgccctcctttcttttctactatgtgcattcggtgctatgaattttcctctaagtactgcgtttcctgcatctcacaaattttgttacattttcattttcaggtagtttgaatatttttacacttctcctgagatgacatctttggctcatgtgttatttagaagtgttgcttagtttctaaagagttggggcttttccagctgtctctctgcaactgatttctaatttaattctactgtagtctgagagcttattttatatgatttctgttattttaaatgtgttgggtgtggtgtttttgttgttattgtttttgtgtctttttgttttgttttgcttcgtttgttttgtttttgagacagtgtcttgctctgtcactcaggctggagtgcaatggcgcgatctcagctcaccgcaacctctgcctcccgggttcaagtgatcctcttgcctcagcctcctgagtagctgggattacaggtgcacgccaccatacccagctaatttttgtatttttagtagagacggggtttcaccatgttggtcaggctggtctcgaactcctgacctcgtgatccgcccacctcggcctcccaaagtgctgggattataggcgtgagccactgtgcctggccattaggtgtgttttatcacccagcatcatgcagtttatcttggtgaatgttctgtgtactcttgaaaagaatgtggattctgctgttgttgggtggagtgttccagaaacatcaattagatccagttggttaatagtgctcatcaggttgtctctatccttccttcctgactgcctgcttgagctgtcagttattgacaggggtgtggagtctccaactctaatggtggatttgtttatttctcctagtagttctatctttttctctccttctacccttgatcctcttctccccctagggcttcctggtgttagtggtgggagagtggggtagtgaagaacctggactttagggccaaagaggccagggttcaaatcctggctctgtcacttcccagttgagtgaccctggctggtgcctgaatctctgtgagcctccacttcctcctctgtgaaattgagagcacttacctggcaggctgtcatgggcatcaagtaacagggcactccacctggaccctgacacgtgatgcacaggaatgccagctgctatgccatgggtgtggcagtagtaataaagtgaccatctgtatcctcaccacagtgaagcctgtccagggctttctctcctatgcccccatgcctccaggtggccttggatcctgttggttctgtgctctgctcagcgacctttctcccgtgggagttcctgggggttcagcttcatcctacagacagcagcacacactggctgtgcaccctttttttttttttttttttttttttgagatggagtctcgcttttttcgcgcaggctgaagtgcagtggtgtgatcttggctcactgcaacctctacctcctgggttcaagtgattttcctgcctcaccctcccaagtagctgggattacaggctcccaccaccacgcccggctaatttttgtattttcagtagagatggtgtttcaccatgttggccaggatggtcttgaactcctgacctcaggtgatccgcccacctcagcctcccaaagtgcagggattacaggcgtgagccaccacacccggagtgccggttgtttttagcagtttgtcttgttcctggagagactggctcctgcccaggagctcggggagtagggccgcggggtgctgcctcacacctcgagtttggccgtaagcagaggggacattttgtgactgtccccctcctgagcttcccagcagcttttctccaagttacagcccaaaagctcaggtggatttgcaacccaacggtgtctgtgcacctcccactgatgcccgaactgccctggccaagaaacggggccgtcagaacgctgcactaactgcagccttgggcctccatgccagaggccatgcccttccatccaccaccccctggcctgggccctggccctcctggctcgggaactccaggccccttcctcacggctcgagagacgtgtatttaccgcacaggtgcttgtcattctcttgtggcctcttctccagggagatcacagaaggacagggcctcactgaggtctcggacatggaccctttgatagtggcaggagccaggctgggcaagaggcggccacagtcacctcagcagtgccatcaccaccgccattcagcccttccctgagccgggcgcgcccctggctctggccccagtgtcccagttacagctcacaggagcttgtggtgcccagcggctgcttctgattgagagtcgaggtcggaggctttgggaggctgagaggctgctcggtttcacaactgctgagggagacttgggctccatctcaggtctgccccatgtcgccctcaacctccagccaccggtcctccgtgtcccccatggccaggcacggcttgcagacatctgtcgttggctcctctcagccgtcgtgggctgaccctggcacgtcctcctgtggctgagcccagtggggacagctgcttccttttattaccctagaactctcgtctttgatcaggccccctcccctatgccacacagtccctgtcactcgggtgagcccagtagtcatggggaaggcctgcgggttccaaacatccaaaggcttgcgtgcagcatgacagcttgaaaccgatgttttttaccttgatcagatttcagcttggcgggggctttgctcagctttcagtgaggcctgggccgatttcccagcatcccctcctgaggccagcctctgtttcctgtgattttctgcacaaagtgggagggaggagtcctaggaaatggggggccacctcgaagcctaggcctcctctggcttctctgtgccagtgcccccacgctttgtgtctgtgtccccagcccatgggactctgctattccctgagtgctgccgcatgcccagcccgcactgaggacgtggagccccgaggggcaggatggcctccatggtcacacgtaggaagtggcctccaccctccgatgatcctctccctcctccctttcagcgccctccccgggggtgtcctcagccctcctgcctgtgctttgtcccgtcttctgcaggcgcctgggacgtgctgacaggtcctctgccggctcctgccttgctatgcgcacgctggtcaccacagaggcctggcccttcttctgtagcagtcccacacccgcaacaggtgtggctgctgaccacctgctttctgcccctctggtcctgaggagggcgcagtgggcactcaggcgtggctgagcagatgtgtgttgccgggaggaggaaggactgctccagtcagggctgaatttcccacccggagcatttctgctgtatttggtgtagcgcctgctgcttaaagctctgattcccagttggcaccctttcccttctgcattgaaaaacatacggatgcatgtcttcttgcagtgaatgtgtattctcccagcctctcttctgggttggggctggaggtggagcggcacacaggagccgcagcgatggaggatgtgcgggtgcagcaccccgtacagcagggatgccaaacccgcgctgagtccctctcaacttctgctttgaagcccagtcacgccattgcctgggttttgctgggcggggctgcgtgtgatgttctcctctgtccctcccccagagccgcccacctgctccccggaccagtttgcatgtgccacaggggagatcgactgtatccccggggcctggcgctgtgacggctttcccgagtgcgatgaccagagcgacgaggagggctgccccgtgtgctccgccgcccagttcccctgcgcgcggggtcagtgtgtggacctgcgcctgcgctgcgacggcgaggcagactgtcaggaccgctcagacgaggcggactgtgacggtgaggccctccccgtcaaggctctgccaagaccctggccctgccctccgggatacgagcttggggctgcctccggcctcacaggagtaggggctctgaaaacctttgcttgcagggagattgccaagtctgtcttttaggcccaacaaggaaaactctgcagttccacccatcctgtcccaccaggtagtgtggcttgaaggcagactgtgagggtctatctcaccttcctgcattaggtcaggagtttcacagaaacctgaggcacattcaggggtgggctgcagaggtccatggctcacaccctggaaaatccgcccccaaaagacagtgctgtctccactgaccagtctgtgggatagtgcttaagcctgagtggtttctatcaacatgtagaatcaggaggtataaagagatttgctcaggcatcctgggccctctctgaccagcaggatcttcctttagatcttgacagtgaaacacatctcttctgtgccccctgtgagttttctttcattcattcattcattcattcattcattcattcattcattcgagacagagtcttgctctgtcacccaggctggagtgccctggtgtaatctcggctcactgcaacctctgcctccagggttcaatcgattctcctgcctcagcctcccgagtagctgggatgacaggtgcgcaccaccatgcctggctaatttttgtatttttagtagagacagggtttcaccatgttggccaggctggtctcgaactcctgacctcaggtgatccgcccgcctcagcctcccaaagtgctgggattacaggcatgagccaccgcgcccggcctgagttttccttttatgaaggacctgcttggttggttgcctgccacatgttgtcagcaccatgggcccaggactgctgaggagctgttgatgccctcgctctcccagagccaccggctctgttagataattcacatgcagtctggccactgtcctacgtcctcattcacaaagagcagacatttcgtagaagatgagggcctgggagtaacctccctgcatgtttttctataaaggcatagtggttaagtccttccagctcattgaccattggagaattttatggaggctgtagactaggggctggtaaactaagggcccaggggccaaatccagcctgccacctacttttgtaaataaagttttcttggtgcacagccatgcccattcattcatttgcacaatgtctgtggctgctttcatgccaaaagcaagagaactgagtggttatgctggagacctacggccttcaaagccccagacctcacgtctggcccttgacagacagagcttccccagccctgctgcgcatcctggcccagcatgtgctgtgtgtgtgatttcagcttgcaggagccgtggttaggaattgtccctgtgttggtccattttgcattgctatgaaggagcacctgaggccgggtagattatgaaggaaagaggtctgtctggctcatggttctgtaggcagcaccagtatggcacccgcatctgctcagcttctagtgaggtctcaggaagctttgactcatggtgaaagtcgaagcgggagcaggtgcatcacatggtgagagagggagcaacggagagagagagagagcgcctctccctcttgccctcaccttgagaggagatgccaggctcctttaagtaaccagctcccatgtgaactcacagtgagagcccatttgctactgcggagagggcaccaggcatctgctcccatgacccaaacactgcccaccaggccctacctccaaccttggggtcatattttattctgttctatgctatgctatgctatgccatgccatgccatgccatgctattcctattctattatttgagacagaatctcgctctgttgcccaggctggagtgcagtggcatgatcttggctcactgcaacctccacctcccaggttcaagcgattctcctgtatcagcctcccgagtagctgggattacaggcacacaccaccacacccggctaatttttgtattttcaatagagatggggtttcaccatgttggccaggctggtctcaaactcctggcctcaagtgatccacctacctcggcctcccaaagtgccatgattacagatgtgagtcactgcgcccagtgagggtcacatttccgttgagatttggaggggcagacgttggagccatctgagccccctcgtcccgctctagcttctcctcccgtgtgccccgcggtgctggtggcaggcccttacgccggttctggctgcatgctctgttccagaagctttcttccctgcttggttaccagaaaatcatcccatccattacaaggacagggtccccttatctcccattcccagggcaggacaccgggggcagggcaggtggggaactgagcaagttctctgggggcaggcgtggctatggctccctctgggtgggcgtctggggaggggtggaggcagccgtcagcgccctggcttgctcttcctccctggccagagactgtggccttgtgctgctcccgtgtgggctgcctgcacctccagtgggttgtgctccctcccctcccctcccctcaagctctgctgagcaccactgccttccacagcccccactctcgggaggcgaggctcctcgtggccattcctgtccttggcacccacccccccaccaacctggtagagccttgggcggggtctgttactccttgcatggcgtagacctccccacagtaggcacctgacacatacctcctggggggcaggcaggaggtgcgttgaggtctcagccctggcagtccctcccctgcgtggcataggcctcgccacagggtcatcgagggtgggtggagactgtactagaccactccccgctggtcctagaaagggtcccatctgtctgctctctgtttggagtccagaccttggttgctgtgccctgcatggtgggctggggggcaccctccagcctctctgagtgcatggcctctccttgcagccatctgcctgcccaaccagttccggtgtgcgagcggccagtgtgtcctcatcaaacagcagtgcgactccttccccgactgtatcgacggctccgacgagctcatgtgtggtgagccagcttctggcacggggaaggggcgtccgggctgggttcccccaggaacgtggagtttaggggaggagacgtgcctttccagcggggctgggggctgtgtgggagactcaggcggctgggaggctccttgcgggaggcagggaagcctttcccagggcagcggccaggaggacagactgtgagctgtgggctcggcggctacagagtctgcctcagtgggcggggctgatggtgtccaggtgcctgcagcacgcacccacccacgggaccttgctgagcagcgtctgtcaggcagcaagattacccgagggctgcagtggtcctgttccctggcagcttactgtctggctgaggaggagtgatgttcacatatgcacacatgtcatgtgcacacacatgtacatgacaacatcccacatgctcctcaaatagcatgacctgtacagtcacggatatagggcctaggggataggaggccaagacagtcagggaagactttccagaggcagtggctcctgaaaggctgtctgattcaggcaggaagggagctgagttcagataggaagtagcaatgagtcattgtgtctggggacatggccactccttcgctgcagagggacctgggctgagagctcctctcttatggctgcagtcgggagagaagtctgttggggggagaagggggcttcctcaagggactccctgtgccctttggcaccttcgtgccaggtcaggcttgaggcctgaaggcagtggtgggggccaccaagggtcgcctcctctgctgggcaagttcccagtctgacgggcctgtgccgtgggccccagctgtgggggcgctgttgatgcgcagccaggcctcgccgccagagcccgcacgcttccattccgctgacttcatcgacgccctcaggatcgctgggccggccctgtgggagagtgaatgtggcttttgccaaagttgagtctggagcctggaaacttccctatgggcagccttgatagtggagtggcccaaggagcccacccagccgaccctgcccctcccgtggctggtgggcggcaccaggggctgcctggctttgctcgttcaccaacatcacctgggctggccagggcgcgctcacttctgccaccaccgagggccctgggcgaaggagtgaataccaggctgccttggcagggatgtgttgagggctgtggggagtcggacagcggcgggggtcagaggaggaggagggtgcaccgtgcaggctgaagggccacgttaccctgaggttggccaggctccccaggcctagcctcccagctcccccactttctccccaccctccaccagtggcaaagccagccccttcagggcgcacggtgtctgcccccaaggagggcccattccgttggggttaatgttggccacctctttctgtttgtctctggcagaaatcaccaagccgccctcagacgacagcccggcccacagcagtgccatcgggcccgtcattggcatcatcctctctctcttcgtcatgggtggtgtctattttgtgtgccagcgcgtggtgtgccagcgctatgcgggggccaacgggcccttcccgcacgagtatgtcagcgggaccccgcacgtgcccctcaatttcatagccccgggcggttcccagcatggccccttcacaggtaaggagcctgagatatggaatgatctggaggaggcaggagagtagtctgggcagctttggggagtggagcagggatgtgctaccccaggccctcttgcacatgtggcagacattgctaatcgatcacagcattcagcctttcccactgagcctgtgcttggcatcagaatccttcaacacagaggcctgcatggctgtagcaacccaccctttggcactgtaggtgtggagaaagctccttggacttgaccttcatattctagtaggacatgtgctgtgttgtccacaaatcctcatgtaccctagaaatgaatgtgggggcggctgggctctctccagagctgaaggaatcactctgtaccatacagcagctttgtcttgagtgcagctgggatttgtggctgagcagttacaattcctacgtggcccaggcaccaggaacgcaggctgtgtttgtagatggctgggcagccgcaccgcagagctgcaccatgctggtttgtatcacatgggtgaccatggtatgtctaagaaggtggagtccctgtgaggtctgcaggtgcccccacagctccaggccaccttgaggattgcctctgcctgcccagccctgagttccctctcccctgtcctgtcccactgtcaccccaagccggcctcattgggagcctgttggatggcagggtatagatgtaacctgattctctctggggagcggggttatctggcttctcaagagctcctaggagcccacagtggtggcaccatcacagtcgcagcagcccccagagaacgcggccctgtctgttcctggcgtgctctgtgctgccccgcctgggttccctgccccagtcgcaggccccttggaggaggtaccatgtgtctcccgtttcacagatgagccccggggagctcactctagtagtggccagagaggcctgcggctcagggagcggggcacatttccaacaggacacaccgccctggtctgagtctcgtgggtagtgggagcagaggagagcgccctatgtctgtggggcggcttggctgagcctggaagccacctgacctcccccgtcccttccctgccaggcatcgcatgcggaaagtccatgatgagctccgtgagcctgatggggggccggggcggggtgcccctctacgaccggaaccacgtcacaggggcctcgtccagcagctcgtccagcacgaaggccacgctgtacccgccggtgaggggcggggccggggaggggcggggcgggatggggctgtgggcccctcccaccgtcagtgctggccaccggaggcttcccgggttcctgggggctgtgccaccgcctctgaggcatgcttgctttcttcccttttcaaacccttctgcttccttctttaatgacattgttgattgtggataatctgaaaactacacaaaaatataaagagccaaaatctcacccaaatccacctcctagagtggctgttgggctccgtcagcatccaggcggccgtctgtgttccgcacggcccagcccatcgatagccgcctgcaccaggcctgtctgccctctgtgagcctccccacagggttccctccacaaacaccctgttctcccacccagggctggctgcttcctggaaaacagctggatggttttgtgcatgacagacaaacacagggtgattttcgtggctaaaatactccctggagcttttggcagggtgaggggctggctccagctgagccacgccttgagtgaaatgactgtgaggagaataaactgccgctgccctccaggatcactggggctggctggggagaacccccgtttctgggagcacagtcccaggatgccaaggcgagcttggtgccgagatgtgaactcctgagtgtaaacagcgggggctgacttgacatgctttgtatgcttttcatttgttcctgcagctgtatgcccctaaggtgagtccagcccccttctgcttcctctggggcctcgccagtgagccccaccttgctggggctggttcctcctgcccttctgggtatccctcacatctggggtcttgtcttcttgttttctttttcttttttttttgagacggagtttcacttttgttgcccaggcttcagtgcaatggtgtgatctctaggctcaccgcaacctctgcctcccaggttcaagcagttcccctgcctcagcctccctagtagctgggattacaggcatgtgccaccacgcccagctaattttgtatttttagtagagatggggtttctccatgttggtcaggctgatcttgaactccctacctcaggtgatccgcccaccttggcctcccaaagtgctgggattacaggcgtgagccaccgcacctggcctttttcttttcttttcttttcttttttctgagacagggtctcgctctgtcacccaggctggagtgcaatggtgtcatcatggctaactgcagcctctaccttctaggctcaagcaatcctcccatctcagcccctaagtagctaggactgcacgcatgcatccccatgcccagctaatatttacattttttgtagagatgaagtttcactatattgcccaggctggtctccaactcctggactcgagcgatcctcctgcctcggcctccccaggtgctgggattacaggcgtgagccaccgtgcctggcctggggtattgtcttcttatggcacctgactgtggtgggccctgggaaggaagtagcagaagagggttcttcttggtttcctggacagtaactgagtgttctggaggccccagggcctggctttgtttagggacaaagggaactggtaaccagaagccgagagtttaaacacccactgcccttcttccctgctcctgctgctgcaacccagcttaaccagccaggagtgctaggaacccaagcagggcccccgagcacacagcaggcagctcacgaattctcttttcctgttctcccttgggagctgggaggatcttaatcaggcaataagagatggcactgagcagccagctaattttttaaatcactttattgtttaaccatatgactcacccacttaaaaaagggtacagttcagtgggttttagtgtattcacagatgtgtgcaaccctcaccacagttaattttagaacattttcctgcccctaaaagaaactctgcatgaagccagctgtttttaaattagcaaagttattttgcatcctttaaatatatgttcatggtacaaaattcaaaagatacagaagagtctgcagtccaaagagactccgcccccatgacgccaagcaggcatccctgggaggcatggcctcctgcagtgtgtttcttctatgtccccccaggggtcatctgtacatatgcaagcatacaagagcgtggactttgttttccaagccagaagataattgtagatttatgtgcagttgtgagaaagagcacagacccatttatcctctgcctggtttcccccagtgctgcctgccatcttgcatgacttccattcctatcataagcaagacactgataacgattctttcaccttattcagattgacataagtgttttttgtttgttcttgagacaaacttcctctgtcacccagtgggagtgcagtggcacaatcacagctcactgcagcctcaaactcctgggctcaagcgattctcctgcctcagtcccctcaagtagctcagatggcaggtgtgcaccatcatgccaggctaatttttaaattttttgtggaggtgaggcctcactaaatttcctgggctagtcttgaactcctgagctaaagtgatcctcctgcctcagcctcccaaagtggtaggattacaggcatgagccactgcgcctgggctgacatatgtgttttcgtaagcccgaaagatagcatctgaagagtcaacattgagccttgccttttgctgctaacgatgtataaaagctgctgttctgagcatttcggaggctcccagctgccgtgtgcaccctgcctagagctctaccgtaacccatctccgggaggaggtgctattgttttcctcattttgcaacaaggaggctgaagaactgagcatgaaccactggcctgggtcgttcggttggtaggcagtggggccaggccatccaactcacaaccaccttctactctgcttcccccgcaccctgaagtttgttctgttttgaggacacagccgtcacattcttggtggctgaacagcactccttgtcaggcgtggctgggcccccactggagggcatcatggtcctctctcctgctgcggttgaaccttggctgtttcaaccactcctgccaagtggccctctgaaagggacagtccatcttttctcagcagagggccacactggcaaaacggtccctggcaccctttctctccacctgtctaatatagagtaaaaatggtatcatgttaagatcttcatttatatttattttatcatgaatgatgtaagcatcattttgtgtgtttaagaacctttgggcccagcgtgatggcttgcagctgtaatctcagcactttaggaggctgagatgagcggatcacttgaggccgggagtttgagaccagcctggccaacatggagaaaccccgtctctagtaaaaatttaaaaattagccgggtatggtgatcccagctacttgggagtctgaagcatgagaattgcttgaacatgggaggcggaggttgcagtgagccgagatcgcgccattgcactccagcctgggcgacagagcgagactctgtctcaaaaaaaaaaaaaaaaaagaaaagaaaagaaattatcaatctcctcttttatggcatatatatatatatatatatatatatatatatatattttttttttttggttatgttcagaaaggccttccctgctctgatcataaaaaacaacttattttcacactctctctcttttttttttgagacagagttttgctcctgttgcccaggctggagtgcagtggcgcaatctcagctcactgtaacctccgcctcccgggttggagtgattctcctgccttaccttcccgagtagctgggattataggcatgcaccaccatgcctggctaattttgtacttttagtagagacgggggtttctccatgttggtcaggctggtctcgaactcgcgacctcaggtgatccacccacctcggcctcccaaagtgctgggattacagacgtgagccaccatgcccagcccacactctctttcttaacgtcctcctcctttcgttttacgttcacatctttaattcttctgggatgtaattagatttgatgagcaaggtgggcatccagcttgtttcttggctgatggcttatgggtggcgtgaattagtcggggtctatcaggaggcagaaactctatgagaatttgaacagagaaagttccgtctacaggcttattaccagggactggaatagcagaaattgaacagtgagatgtacagagaactctaagaatgcaggaataggccaggcatggtggctcacacctgtcatcccagcactttgggagaccaaggcgggtggatcacctgaggtcaggagttcgagaccagcctggccaacatagtgaaaccccatctctactaaaaatacaaaaaaattagctgggtgtggtggcgcatgcctgtaatcccagcttctcgggagtctgaggctggagaatcacttgaacctgggaggcagaggttgtagtgagccgagatcatgccattgtactccagcctgggcaacaagagcgagactcagtcaaaacaacaacaacgcaggaatagcagatgagccgaggtggggcctccccagcccccaccccccaccccccaccctgggccgagatccagtcctctttgaatagggcctggccgtggttcacgggacatctgagacattgccgaggcgctgcactggtggatcttgccagaagtctgcccagtgcagatttgggcagaatctcaaactgccttgggatgtaggagagaaaccaggcctggtcaagttcatgggaagaggtggaaacagaccccataggctggggcttgggcagctgtaggaagccctctctgctgcctccctgcctgctctctgctttgaagcatcttccccagtgcccccagtctcatgccctctcaacgttggggtcaaatcctgaggaatacccagactggctctctgggccaaagaggaccctctccagaaagagcagggcccagtgcggcttcctaaagggcaggggaagggcctggccactccccagaggctactcaccagccatcaggatagccccaggaagcaggccttctcgagcccattttattactttattttattattttatttaattttaaatttattttttgagacagagtctcactctgttgcccaggctggagtgcagtggtgcgatctcaacccactgcagcctctgcctccagggttcaagggattctcccacctcagcctcccaagtagctgggattacaggtgcccgccaccacacccggctaattttcatatttttagtagagatgaggtttcaccatgttggccaggctggtctcgaactcctgacctcaagtgatccgcccgcctcggcctcccaaagtgctaggtcaagcccattttaaagttgaagaaactgaggctgaggtaaattccctccccagggatcctgctgcagccagaaggtggtaaaacaggacttcacccgggtctgtctggcgtgaaaggcagtgttcttgtaccaccctagggggcctgagagaactgagtccctcgggcataactgacagttctgttcccattattccgcaggggctcggatctggctgtatgctttccaggatggccttggagacccacataagccctacaccctttgggaagctgcatgttgggttggggtgccgtcagtggcacttgtggaaggtgcagacctgtgtgggtgtgtgggcccagggcccctggtcccttcctccctttgtagggctggttgtgtgctgcctggacctggggggcacgttcacgtggtgaatttgtctatttactatccccgctttggggctggtgccagcacaggcccttgtgaagggggtgcctttgtctggagtgggactgtggcccctccctcagcgtggtgacttctgtgtcagggcttcagcagggacgcagagcccctgagtgttcggaacaagggcgtcattgcaggagttagactgtgtgtgatggagggaggaggggcaggaggaaaggtcagaaggagagttcctgggaaggtccctgaggagcctggtgaggtgctaactggtgtggaggacactcagggcctgtggggacatctcctactgctgggggccagccacaaagggaactggccgaagtcctgtccccgccttcacagcccagcatctggtcacaaggcaggtacttggaagggcgcgggcacctgggccaaaagtgcctgggttccctttgcctttcactgagatgaccttcggggcaggtggctgctgcctcccctcctgtccccaggttttgccaactggccagaggaaggggtcctgggaagcaggggggccagaagccctctctgcaaggaaagcccgaggggtgtgggaggaaggaaggaatgcccaggctggcgaggctctaagtcaccctggcttggctctcctcagatcctgaacccgccgccctccccggccacggacccctccctgtacaacatggacatgttctactcttcaaacattccggccactgcgagaccgtacaggtaggacatcccctgcagccctccatggccattgggttcccgccagcccgtggtggaggggcctaatccccatgccactgatgaggggaggtattctgggtgctagtgggcaggtgccgggcccagccctgcctccctctgctctgccaaccacactaggctgcctccccagacaagctcagcgggcactgcatgttgggttcagaaatcagcagaactccacgttctgagctgctcttcaagttgctcctatgggggttacttttaagctgggaaatggctgtggcgtcgaggggccgggggcttgggctccagagtctgactgtgtgtttgagtccggctgtggaaacctagccattgagatgccccctcttggtggctctgtcctcttaggatgggacaagtctgtgaaggctgctgcagcacccaccgtagacccctaatcgtgtgacgtcaccaggatggtccgggctgctcacttgccacagtggcctgtttgagcccgggaagccaacggggctgctcagctggacaccagccccccgagctgcccatgttggggtcacaggccccacctccctggttggggaggggcaactgagagtgtggagaggtgggacccaggtgtgctggtctccgcaggggctggatcagagcctgggatgggcagggtgagcctcctgacctttaacccagtggtgtcaggcaacgtggcccacccgccagccgcaccaggccccacccccgcaggtgaaggggtgggataggctgggcctgggccaggacacctctggaccacgcattcctcattgcttgggtccctggagcagcagggcctcccgagtgtggtgccgcctgccacctagtggccatttccacgaactcccaggcctggctggggagccggaactgcagcctccatttccaccccactccgggtcgggccacctccctgatgcctcagtattatatcaaactgtcacagtctgtcccacagccttacagaccactgtctccagaatggtcacatccacactgggcagcccagtctcgctagttcctcgtcccacctcctgcctttgctcatgcccgtcctgctctgggcccaccgcggacacatcttccccccgcccgccgtctgacctcacagcagctgggccccaagaggagtatcctgtcctgctgcacttttctcaacacccggtgttggctgcaccttcccacccattgcaggcccctctgtgacaggacgggggctcctaaacacaccacagttccgagtctgaactcacacagtgggatgcggcgtttctgggccacagttgggtgcaggtagcctctgggaggatgggaggtcaggagccatcttgcgagtcaggttgcttgaactcaggatggaagtgttccgggcccattggttgctgtattagcctgttctcacgctgctaataaagacatacccaagactgggtaattgtaaaggaaagaggtttaacggactcacagttccacctgcctggggtggcctcacaatcatggtagaagacaaggaggagcaagtcacatcttacatggcttcagggaacagacagcatgagaaccaagcgaaaggggtttccccttgtaaaaccatcaagtctagtgagatttattcactaccacgagaacagtatggggggaaccacccccatgattcaatcatctcccactgggtccctcccacagcacgtgggaattatgggagtacaattcaagatgagatttgggtggggacacagccaaaccctatcggttgccaacatttacagtaacagtgttaggtgaacagttgtccagtctcctgttttgtcggacactgtttctagcaccttccaggcagaatctcatgtatccttcactttcgaaatgggtactatttcatccccacttttatcaatgagaaactaaagctcgaagaggtcaagtaagttcctggccaaggtcagctagcaggctctagaggcctcgttctccttagaggcagccttgccagggcccaggcttggcaggctgcagggcaggtgcgggcatgcccatggtagaggtgggaccattgaggctcagagagggtaagtgatgagccctggcgacacagcggggtgggtccagagtccggcctgcatcttctggagctggccagtggacaggcctttcccgttcacagccccggggctgctgtgcccaccagggcggatgtgcctaccgaatcccactcctctgtgtgtgtccctttcaggccctacatcattcgaggaatggcgcccccgacgacgccctgcagcaccgacgtgtgtgacagcgactacagcgccagccgctggaaggccagcaagtactacctggatttgaactcggactcagacccctatccacccccacccacgccccacagccagtacctgtcggcggaggacagctgcccgccctcgcccgccaccgagaggagctacttccatctcttcccgccccctccgtccccctgcacggactcatcctgacctcggccgggccactctggcttctctgtgcccctgtaaatagttttaaatatgaacaaagaaaaaaatatattttatgatttaaaaaataaatataattgggattttaaaaacatgagaaatgtgaactgtgatggggtgggcagggctgggagaactttgtacagtggagaaatatttataaacttaattttgtaaaacag

SEQ ID NO: 27 - DNA, 5099 bp, Homo sapiens
atggagcccgagtgagcgcggcgcgggcccgtccggccgccggacaacatggaggcagcgccgcccgggccgccgtggccgctgctgctgctgctgctgctgctgctggcgctgtgcggctgcccggcccccgccgcggcctcgccgctcctgctatttgccaaccgccgggacgtacggctggtggacgccggcggagtcaagctggagtccaccatcgtggtcagcggcctggaggatgcggccgcagtggacttccagttttccaagggagccgtgtactggacagacgtgagcgaggaggccatcaagcagacctacctgaaccagacgggggccgccgtgcagaacgtggtcatctccggcctggtctctcccgacggcctcgcctgcgactgggtgggcaagaagctgtactggacggactcagagaccaaccgcatcgaggtggccaacctcaatggcacatcccggaaggtgctcttctggcaggaccttgaccagccgagggccatcgccttggaccccgctcacgggtacatgtactggacagactggggtgagacgccccggattgagcgggcagggatggatggcagcacccggaagatcattgtggactcggacatttactggcccaatggactgaccatcgacctggaggagcagaagctctactgggctgacgccaagctcagcttcatccaccgtgccaacctggacggctcgttccggcagaaggtggtggagggcagcctgacgcaccccttcgccctgacgctctccggggacactctgtactggacagactggcagacccgctccatccatgcctgcaacaagcgcactggggggaagaggaaggagatcctgagtgccctctactcacccatggacatccaggtgctgagccaggagcggcagcctttcttccacactcgctgtgaggaggacaatggcggctgctcccacctgtgcctgctgtccccaagcgagcctttctacacatgcgcctgccccacgggtgtgcagctgcaggacaacggcaggacgtgtaaggcaggagccgaggaggtgctgctgctggcccggcggacggacctacggaggatctcgctggacacgccggacttcaccgacatcgtgctgcaggtggacgacatccggcacgccattgccatcgactacgacccgctagagggctatgtctactggacagatgacgaggtgcgggccatccgcagggcgtacctggacgggtctggggcgcagacgctggtcaacaccgagatcaacgaccccgatggcatcgcggtcgactgggtggcccgaaacctctactggaccgacacgggcacggaccgcatcgaggtgacgcgcctcaacggcacctcccgcaagatcctggtgtcggaggacctggacgagccccgagccatcgcactgcaccccgtgatgggcctcatgtactggacagactggggagagaaccctaaaatcgagtgtgccaacttggatgggcaggagcggcgtgtgctggtcaatgcctccctcgggtggcccaacggcctggccctggacctgcaggaggggaagctctactggggagacgccaagacagacaagatcgaggtgatcaatgttgatgggacgaagaggcggaccctcctggaggacaagctcccgcacattttcgggttcacgctgctgggggacttcatctactggactgactggcagcgccgcagcatcgagcgggtgcacaaggtcaaggccagccgggacgtcatcattgaccagctgcccgacctgatggggctcaaagctgtgaatgtggccaaggtcgtcggaaccaacccgtgtgcggacaggaacggggggtgcagccacctgtgcttcttcacaccccacgcaacccggtgtggctgccccatcggcctggagctgctgagtgacatgaagacctgcatcgtgcctgaggccttcttggtcttcaccagcagagccgccatccacaggatctccctcgagaccaataacaacgacgtggccatcccgctcacgggcgtcaaggaggcctcagccctggactttgatgtgtccaacaaccacatctactggacagacgtcagcctgaagaccatcagccgcgccttcatgaacgggagctcggtggagcacgtggtggagtttggccttgactaccccgagggcatggccgttgactggatgggcaagaacctctactgggccgacactgggaccaacagaatcgaagtggcgcggctggacgggcagttccggcaagtcctcgtgtggagggacttggacaacccgaggtcgctggccctggatcccaccaagggctacatctactggaccgagtggggcggcaagccgaggatcgtgcgggccttcatggacgggaccaactgcatgacgctggtggacaaggtgggccgggccaacgacctcaccattgactacgctgaccagcgcctctactggaccgacctggacaccaacatgatcgagtcgtccaacatgctgggtcaggagcgggtcgtgattgccgacgatctcccgcacccgttcggtctgacgcagtacagcgattatatctactggacagactggaatctgcacagcattgagcgggccgacaagactagcggccggaaccgcaccctcatccagggccacctggacttcgtgatggacatcctggtgttccactcctcccgccaggatggcctcaatgactgtatgcacaacaacgggcagtgtgggcagctgtgccttgccatccccggcggccaccgctgcggctgcgcctcacactacaccctggaccccagcagccgcaactgcagcccgcccaccaccttcttgctgttcagccagaaatctgccatcagtcggatgatcccggacgaccagcacagcccggatctcatcctgcccctgcatggactgaggaacgtcaaagccatcgactatgacccactggacaagttcatctactgggtggatgggcgccagaacatcaagcgagccaaggacgacgggacccagccctttgttttgacctctctgagccaaggccaaaacccagacaggcagccccacgacctcagcatcgacatctacagccggacactgttctggacgtgcgaggccaccaataccatcaacgtccacaggctgagcggggaagccatgggggtggtgctgcgtggggaccgcgacaagcccagggccatcgtcgtcaacgcggagcgagggtacctgtacttcaccaacatgcaggaccgggcagccaagatcgaacgcgcagccctggacggcaccgagcgcgaggtcctcttcaccaccggcctcatccgccctgtggccctggtggtggacaacacactgggcaagctgttctgggtggacgcggacctgaagcgcattgagagctgtgacctgtcaggggccaaccgcctgaccctggaggacgccaacatcgtgcagcctctgggcctgaccatccttggcaagcatctctactggatcgaccgccagcagcagatgatcgagcgtgtggagaagaccaccggggacaagcggactcgcatccagggccgtgtcgcccacctcactggcatccatgcagtggaggaagtcagcctggaggagttctcagcccacccatgtgcccgtgacaatggtggctgctcccacatctgtattgccaagggtgatgggacaccacggtgctcatgcccagtccacctcgtgctcctgcagaacctgctgacctgtggagagccgcccacctgctccccggaccagtttgcatgtgccacaggggagatcgactgtatccccggggcctggcgctgtgacggctttcccgagtgcgatgaccagagcgacgaggagggctgccccgtgtgctccgccgcccagttcccctgcgcgcggggtcagtgtgtggacctgcgcctgcgctgcgacggcgaggcagactgtcaggaccgctcagacgaggcggactgtgacgccatctgcctgcccaaccagttccggtgtgcgagcggccagtgtgtcctcatcaaacagcagtgcgactccttccccgactgtatcgacggctccgacgagctcatgtgtgaaatcaccaagccgccctcagacgacagcccggcccacagcagtgccatcgggcccgtcattggcatcatcctctctctcttcgtcatgggtggtgtctattttgtgtgccagcgcgtggtgtgccagcgctatgcgggggccaacgggcccttcccgcacgagtatgtcagcgggaccccgcacgtgcccctcaatttcatagccccgggcggttcccagcatggccccttcacaggcatcgcatgcggaaagtccatgatgagctccgtgagcctgatggggggccggggcggggtgcccctctacgaccggaaccacgtcacaggggcctcgtccagcagctcgtccagcacgaaggccacgctgtacccgccgatcctgaacccgccgccctccccggccacggacccctccctgtacaacatggacatgttctactcttcaaacattccggccactgcgagaccgtacaggccctacatcattcgaggaatggcgcccccgacgacgccctgcagcaccgacgtgtgtgacagcgactacagcgccagccgctggaaggccagcaagtactacctggatttgaactcggactcagacccctatccacccccacccacgccccacagccagtacctgtcggcggaggacagctgcccgccctcgcccgccaccgagaggagctacttccatctcttcccgccccctccgtccccctgcacggactcatcctgacctcggccgggccactctggcttctctgtgcccctgtaaatagttttaaatatgaacaaagaaaaaaatatattttatgatttaaaaaataaatataattgggattttaaaaacatgagaaatgtgaactgtgatggggtgggcagggctgggagaactttgtacagtggagaaatatttataaacttaattttgtaaaacag

SEQ ID NO: 28 - protein, 1603 aa, Homo sapiens
MEAAPPGPPWPLLLLLLLLLALCGCPAPAADLLLFANRRDVRLVDAGGVKLESTIVVSGLEDAAAVDFQFSKGAVYWTDVSEEAIKQTYLNQTGAAVQNVVISGLVSPDGLACDWVGKKLYWTDSETNRIEVANLNGTSRKVLFWQDLDQPRAIALDPAHGYMYWTDWGETPRIERAGMDGSTRKIIVDSDIYWPNGLTIDLEEQKLYWADAKLSFIHRANLDGSFRQKVVEGSLTHPFALTLSGDTLYWTDWQTRSIHACNKRTGGKRKEILSAKPMDIQVLSQERQPFFHTRCEEDNGGCSHLCLLSPSEPFYTCACPTGVQLQDNGRTCKAGAEEVLLLARRTDLRRISLDTPDFTDIVLQVDDIRHAIAIDYDPLEGYVYWTDDEVRAIRRAYLDGSGAQTLVNTEINDPDGIAVDWVARNLYWTDTGTDRIEVTRLNGTSRKILVSEDLDEPRAIALHPVMGLMYWTDWGENPKIECANLDGQERRVLVNASLGWPNGLALDLQEGKLYWGDAKTDKIEVINVDGTKRRTLLEDKLPHIFGFTLLGDFIYWTDWQRRSIERVHKVKASRDVIIDQLPDLMGLKAVNVAKVVGTNPCADRNGGCSHLCFFTPHATRCGCPIGLELLSDMKTCIVPEAFLVFTSRAAIHRISLETNNNDVAIPLTGVKEASALDFDVSNNHIYWTDVSLKTISRAFMNGSSVEHVVEFGLDYPEGMAVDWMGKNLYWADTGTNRIEVARLDGQFRQVLVWRDLDNPRSLALDPTKGYIYWTEWGGKPRIVRAFMDGTNCMTLVDKVGRANDLTIDYADQRLYWTDLDTNMIESSNMLGQERVVIADDLPHPFGLTQYSDYIYWTDWNLHSIERADKTSGRNRTLIQGHLDFVMDILVFHSSRQDQDCMHNNGQCGQLCLAIPGGHRCGCASHYTLDPSSRNCSPPTTFLLFSQKSAISRMIPDDQHSPDLILPLHGLRNVKAIDYDPLDKFIYWVDGRQNIKRAKDDGTQPFVLTSLSQGQNPDRQPHDLSIDIYSRTLFWTCEATNTINVHRLSGEAMGVVLRGDRDKPRAIVVNAERGYLYFTNMQDRAAKIERAALDGTEREVLFTTGLIRPVVVDNTLGKLFWVDADLKRIESCDLSGANRLTLEDANIVQPLGLTILGKHLYWIDRQQQMIERVEKTTGDKRTRIQGRVAHLTGIHAVEEVSLEEFSAHPCARDNGGCSHICIAKGDGTPRCSCPVHLVLLQNLLTCGEPPTCSPDQFACATGEIDCIPGAWRCDGFPECDDQSDEEGCPVCSAAQFPCRQCVDLRLRCDGEADCQDRSDEADCDAICLPNQFRCASGQCVLIKQQCDSFPDCIDGSDELMCEITKPPSDDSPAHSSAIGPVIGIILSLFVMGGVYFVCQRVVCQRYAGANGPFFYVSGTPHVPLNFIAPGGSQHGPFTGIACGKSMMSSVSLMGGRGGVPLYDRNHVTGASSSSSSSTKATLYPPILNPPPSPATDPSLYNMDMFYSSNIPATARPYRPYIIRGMAPPTTPCSTDVCDSDYSASRWKASKYYLDLNSDSDPYPPPPTPHSQYLSAEDSCPPSPATERSYFHLFPPPPSPCTDSS

SEQ ID NO: 29 - DNA, 5135 bp, Homo sapiens
atggagcccgagtgagcgcggcgcgggcccgtccggccgccggacaacatggaggcagcgccgcccgggccgccgtggccgctgctgctgctgctgctgctgctgctggcgctgtgcggctgcccggcccccgccgcggcctcgccgctcctgctatttgccaaccgccgggacgtacggctggtggacgccggcggagtcaagctggagtccaccatcgtggtcagcggcctggaggatgcggccgcagtggacttccagttttccaagggagccgtgtactggacagacgtgagcgaggaggccatcaagcagacctacctgaaccagacgggggccgccgtgcagaacgtggtcatctccggcctggtctctcccgacggcctcgcctgcgactgggtgggcaagaagctgtactggacggactcagagaccaaccgcatcgaggtggccaacctcaatggcacatcccggaaggtgctcttctggcaggaccttgaccagccgagggccatcgccttggaccccgctcacgggtacatgtactggacagactggggtgagacgccccggattgagcgggcagggatggatggcagcacccggaagatcattgtggactcggacatttactggcccaatggactgaccatcgacctggaggagcagaagctctactgggctgacgccaagctcagcttcatccaccgtgccaacctggacggctcgttccggcagaaggtggtggagggcagcctgacgcaccccttcgccctgacgctctccggggacactctgtactggacagactggcagacccgctccatccatgcctgcaacaagcgcactggggggaagaggaaggagatcctgagtgccctctactcacccatggacatccaggtgctgagccaggagcggcagcctttcttccacactcgctgtgaggaggacaatggcggctgctcccacctgtgcctgctgtccccaagcgagcctttctacacatgcgcctgccccacgggtgtgcagctgcaggacaacggcaggacgtgtaaggcaggagccgaggaggtgctgctgctggcccggcggacggacctacggaggatctcgctggacacgccggacttcaccgacatcgtgctgcaggtggacgacatccggcacgccattgccatcgactacgacccgctagagggctatgtctactggacagatgacgaggtgcgggccatccgcagggcgtacctggacgggtctggggcgcagacgctggtcaacaccgagatcaacgaccccgatggcatcgcggtcgactgggtggcccgaaacctctactggaccgacacgggcacggaccgcatcgaggtgacgcgcctcaacggcacctcccgcaagatcctggtgtcggaggacctggacgagccccgagccatcgcactgcaccccgtgatgggcctcatgtactggacagactggggagagaaccctaaaatcgagtgtgccaacttggatgggcaggagcggcgtgtgctggtcaatgcctccctcgggtggcccaacggcctggccctggacctgcaggaggggaagctctactggggagacgccaagacagacaagatcgaggtgatcaatgttgatgggacgaagaggcggaccctcctggaggacaagctcccgcacattttcgggttcacgctgctgggggacttcatctactggactgactggcagcgccgcagcatcgagcgggtgcacaaggtcaaggccagccgggacgtcatcattgaccagctgcccgacctgatggggctcaaagctgtgaatgtggccaaggtcgtcggaaccaacccgtgtgcggacaggaacggggggtgcagccacctgtgcttcttcacaccccacgcaacccggtgtggctgccccatcggcctggagctgctgagtgacatgaagacctgcatcgtgcctgaggccttcttggtcttcaccagcagagccgccatccacaggatctccctcgagaccaataacaacgacgtggccatcccgctcacgggcgtcaaggaggcctcagccctggactttgatgtgtccaacaaccacatctactggacagacgtcagcctgaagaccatcagccgcgccttcatgaacgggagctcggtggagcacgtggtggagtttggccttgactaccccgagggcatggccgttgactggatgggcaagaacctctactgggccgacactgggaccaacagaatcgaagtggcgcggctggacgggcagttccggcaagtcctcgtgtggagggacttggacaacccgaggtcgctggccctggatcccaccaagggctacatctactggaccgagtggggcggcaagccgaggatcgtgcgggccttcatggacgggaccaactgcatgacgctggtggacaaggtgggccgggccaacgacctcaccattgactacgctgaccagcgcctctactggaccgacctggacaccaacatgatcgagtcgtccaacatgctgggtcaggagcgggtcgtgattgccgacgatctcccgcacccgttcggtctgacgcagtacagcgattatatctactggacagactggaatctgcacagcattgagcgggccgacaagactagcggccggaaccgcaccctcatccagggccacctggacttcgtgatggacatcctggtgttccactcctcccgccaggatggcctcaatgactgtatgcacaacaacgggcagtgtgggcagctgtgccttgccatccccggcggccaccgctgcggctgcgcctcacactacaccctggaccccagcagccgcaactgcagcccgcccaccaccttcttgctgttcagccagaaatctgccatcagtcggatgatcccggacgaccagcacagcccggatctcatcctgcccctgcatggactgaggaacgtcaaagccatcgactatgacccactggacaagttcatctactgggtggatgggcgccagaacatcaagcgagccaaggacgacgggacccaggcagtgctcaggagtcttggtttctttgtcttacagccctttgttttgacctctctgagccaaggccaaaacccagacaggcagccccacgacctcagcatcgacatctacagccggacactgttctggacgtgcgaggccaccaataccatcaacgtccacaggctgagcggggaagccatgggggtggtgctgcgtggggaccgcgacaagcccagggccatcgtcgtcaacgcggagcgagggtacctgtacttcaccaacatgcaggaccgggcagccaagatcgaacgcgcagccctggacggcaccgagcgcgaggtcctcttcaccaccggcctcatccgccctgtggccctggtggtggacaacacactgggcaagctgttctgggtggacgcggacctgaagcgcattgagagctgtgacctgtcaggggccaaccgcctgaccctggaggacgccaacatcgtgcagcctctgggcctgaccatccttggcaagcatctctactggatcgaccgccagcagcagatgatcgagcgtgtggagaagaccaccggggacaagcggactcgcatccagggccgtgtcgcccacctcactggcatccatgcagtggaggaagtcagcctggaggagttctcagcccacccatgtgcccgtgacaatggtggctgctcccacatctgtattgccaagggtgatgggacaccacggtgctcatgcccagtccacctcgtgctcctgcagaacctgctgacctgtggagagccgcccacctgctccccggaccagtttgcatgtgccacaggggagatcgactgtatccccggggcctggcgctgtgacggctttcccgagtgcgatgaccagagcgacgaggagggctgccccgtgtgctccgccgcccagttcccctgcgcgcggggtcagtgtgtggacctgcgcctgcgctgcgacggcgaggcagactgtcaggaccgctcagacgaggcggactgtgacgccatctgcctgcccaaccagttccggtgtgcgagcggccagtgtgtcctcatcaaacagcagtgcgactccttccccgactgtatcgacggctccgacgagctcatgtgtgaaatcaccaagccgccctcagacgacagcccggcccacagcagtgccatcgggcccgtcattggcatcatcctctctctcttcgtcatgggtggtgtctattttgtgtgccagcgcgtggtgtgccagcgctatgcgggggccaacgggcccttcccgcacgagtatgtcagcgggaccccgcacgtgcccctcaatttcatagccccgggcggttcccagcatggccccttcacaggcatcgcatgcggaaagtccatgatgagctccgtgagcctgatggggggccggggcggggtgcccctctacgaccggaaccacgtcacaggggcctcgtccagcagctcgtccagcacgaaggccacgctgtacccgccgatcctgaacccgccgccctccccggccacggacccctccctgtacaacatggacatgttctactcttcaaacattccggccactgcgagaccgtacaggccctacatcattcgaggaatggcgcccccgacgacgccctgcagcaccgacgtgtgtgacagcgactacagcgccagccgctggaaggccagcaagtactacctggatttgaactcggactcagacccctatccacccccacccacgccccacagccagtacctgtcggcggaggacagctgcccgccctcgcccgccaccgagaggagctacttccatctcttcccgccccctccgtccccctgcacggactcatcctgacctcggccgggccactctggcttctctgtgcccctgtaaatagttttaaatatgaacaaagaaaaaaatatattttatgatttaaaaaataaatataattgggattttaaaaacatgagaaatgtgaactgtgatggggtgggcagggctgggagaactttgtacagtggagaaatatttataaacttaattttgtaaaacag

SEQ ID NO: 30 - protein, 1615 aa, Homo sapiens
MEAAPPGPPWPLLLLLLLLLALCGCPAPAADLLLFANRRDVRLVDAGGVKLESTIVVSGLEDAAAVDFQFSKGAVYWTDVSEEAIKQTYLNQTGAAVQNVVISGLVSPDGLACDWVGKKLYWTDSETNRIEVANLNGTSRKVLFWQDLDQPRAIALDPAHGYMYWTDWGETPRIERAGMDGSTRKIIVDSDIYWPNGLTIDLEEQKLYWADAKLSFIHRANLDGSFRQKVVEGSLTHPFALTLSGDTLYWTDWQTRSIHACNKRTGGKRKEILSAKPMDIQVLSQERQPFFHTRCEEDNGGCSHLCLLSPSEPFYTCACPTGVQLQDNGRTCKAGAEEVLLLARRTDLRRISLDTPDFTDIVLQVDDIRHAIAIDYDPLEGYVYWTDDEVRAIRRAYLDGSGAQTLVNTEINDPDGIAVDWVARNLYWTDTGTDRIEVTRLNGTSRKILVSEDLDEPRAIALHPVMGLMYWTDWGENPKIECANLDGQERRVLVNASLGWPNGLALDLQEGKLYWGDAKTDKIEVINVDGTKRRTLLEDKLPHIFGFTLLGDFIYWTDWQRRSIERVHKVKASRDVIIDQLPDLMGLKAVNVAKVVGTNPCADRNGGCSHLCFFTPHATRCGCPIGLELLSDMKTCIVPEAFLVFTSRAAIHRISLETNNNDVAIPLTGVKEASALDFDVSNNHIYWTDVSLKTISRAFMNGSSVEHVVEFGLDYPEGMAVDWMGKNLYWADTGTNRIEVARLDGQFRQVLVWRDLDNPRSLALDPTKGYIYWTEWGGKPRIVRAFMDGTNCMTLVDKVGRANDLTIDYADQRLYWTDLDTNMIESSNMLGQERVVIADDLPHPFGLTQYSDYIYWTDWNLHSIERADKTSGRNRTLIQGHLDFVMDILVFHSSRQDQDCMHNNGQCGQLCLAIPGGHRCGCASHYTLDPSSRNCSPPTTFLLFSQKSAISRMIPDDQHSPDLILPLHGLRNVKAIDYDPLDKFIYWVDGRQNIKRAKDDGTQAVLRSLGFFVLQPFVLTSLSQGQNPDRQPHDLSIDIYSRTLFWTCEATNTINVHRLSGEAMGVVLRGDRDKPRAIVVNAERGYLYFTNMQDRAAKIERAALDGTEREVLFTTGLIRPVVVDNTLGKLFWVDADLKRIESCDLSGANRLTLEDANIVQPLGLTILGKHLYWIDRQQQMIERVEKTTGDKRTRIQGRVAHLTGIHAVEEVSLEEFSAHPCARDNGGCSHICIAKGDGTPRCSCPVHLVLLQNLLTCGEPPTCSPDQFACATGEIDCIPGAWRCDGFPECDDQSDEEGCPVCSAAQFPCRQCVDLRLRCDGEADCQDRSDEADCDAICLPNQFRCASGQCVLIKQQCDSFPDCIDGSDELMCEITKPPSDDSPAHSSAIGPVIGIILSLFVMGGVYFVCQRVVCQRYAGANGPFFYVSGTPHVPLNFIAPGGSQHGPFTGIACGKSMMSSVSLMGGRGGVPLYDRNHVTGASSSSSSSTKATLYPPILNPPPSPATDPSLYNMDMFYSSNIPATARPYRPYIIRGMAPPTTPCSTDVCDSDYSASRWKASKYYLDLNSDSDPYPPPPTPHSQYLSAEDSCPPSPATERSYFHLFPPPPSPCTDSS

SEQ ID NO: 31 - DNA, 20859 bp, Mus musculus
  misc_feature (1)...(20859): n = A,T,C or G
ttatccatggactcccacgaagtgctgctggctgccacatacctgctgggaacgctgggtgagtctctgccggtactgggtactgccaggctgaatacctgtgcataccggggtgcagtaagaggatctcagttcttcccaggtctgactctgggctcatgtgcaatagcagggaggcttagggtcacagaggttaggtcaactccccattctccgcggggctctgcgcgtgcattgccaagcctgatccactgtctttctcagctttgggttagaagtcagtgtgcacttagtttccaacctgtgcagccaccctctccagggtgccacctagaaatgcctggcctttatttggtcacctccagggaggcacaaacctgatattgaggatgctccgggcagagtaggctgcggcagaatggtccatttataaggatgcggaagaacagagagatgccaagctcaaacagcagccctatgtcagttctaaaggagtccccaactcatgagccttgctccaaacctgagaccctgctggtgggccatcagtgacatcaggaaagtaagcgattcttgactagccagaggtatgctgtgggcgctaggcctggaggcccaaagagatcctccgggtcacagcatgtgcacagagcagagcagagatgtaaactgacgtggcggggtaaaggctgctggatgccaggtgggatggaaaagaagaaatggctttctacttcacagagaagggttgggggcttcagatacccactctgtacctacaagagctaggagtgagtgtgagaatgtgtgactctggatgtggaggggtgcgttttgaatgtatgtatctatgagaactgtgtgtgcactctcctggacactatatgacctcttcactcatgttagcatgacttggatgcccacgtacacaccccttgtgcattggacagtaagaggtacaccatgcctgcttgacaaatcttggcttgcttcctggaccttactaggacattgatgtggtccctttggtcctgagaatctcagaagccaagcctttatcccctgccccaatccaggccttctctgcagtctcagacccacacacaaggagacaggacccacccatggtccccactgggcatggagtgagctcttggcaggactgcaggtacccctgttccatggaagccagagtccagaagagatggaatcgaaccatcaccccagtagagttatcatttggaggcctgggagcacatggtccctgtatgttgctagagtcttataggtagaaagtagtttcttagtcgtgggtaggtagggaacagctcgcacttttattttacttttatggtcctatgattgaacccaggacctcacacatgctacgcaagctatggctgagctacagcctgccactttttactttaaaaaaaaaacaaaactgtttttagacatttgggtgtgtgtgtgtgtgtatgtgtgtgtgtgtgtgtgtgtgtgtgtgcatacatgcatgtgtaccaagactttattcccaccctacaaccagccctccccggcagcctcaagtgtgctatgcaggaatgccattgggtcagaggacaatttgcaagagtcagttctctccttctgccctgtgagtccaagagatagaaattggcacatgagtcttggcagagaatgcctttacccacttagccatcctacagggccccagctttttgaagcatggtctccataaatgaccagctggcctgaacttactccataacccaggagtgtcttcaacttgcaatcctcctgcctcagcctctccggtagctggaattacaggcctgtgccaccaggcctgattttcatgaaatccttttaaatcctttttttttttttcctgttagcttctgaatagtacagaaaatatgtggagccatcttcccattttacagtgagtgaaaactgaggcccaggagtggcaagcgcatggtggaacaggtggtgagcagcatggagagcctggcctacatttctgccctcacacagccccaccacctctgtaggagtaataggttcccaaagccattctcacacgtcagagcatgaccataggagaagccttcatcagcagagacacaaacatcaaggcatagggctgtggatactctaggacctaaggaatgaagatctttacaacctggctagggttcccacattgtcccctcttacaatttttctgagcctcaatcattgaagtgggttggggacgtggctcagacaccacagtaactccaaaaaccaatttgagttccactctggcacttttggctaggtgaccccgggcgctggtttggtaatcctccctctccttcactgtaaggagaataacagcaaatggcaaggaaacgaattaactcacagtaggcctagcctatatgtggtggagatagtgctcagtggacactagggtcatctggaagcaaggcaaggcagaatgggatcttaccaagcgctcgccacaccatagatcttctccccctttcttctgcccaggctgttcatccacccattcgcttattcactctcactcattcactcattcattcatctacaaatctgttctgagcatgtgctactcagctctttacagcggcaggagcatcgagagccaaggcagacattttggcccacgggcctgcgccgctcacagagacccgacagaggaagtatggaagccagcacccgaatcctcacatgtctgggggcctgagcacatcacagggccctacttggcatatggacctggatgtgcaggcacaggatcatttgaagggactgccattccctctgccaccctgagccccaagtgctaagaagagccagctagtgaaaggaggggagaggcacttgggtagaggaggccacagggtaaaggccataaggacaagacaggctaggtatgtgctagctgagagcaggctgtgagctgctctcccaggatacacagctgaggttgtctttggctctaagcacaaaggaaaggaaccctgactgacccacagatcctggaagccataggtactggctctatgctcattcagcatggctccaccaagggggtcagatggtctaagaattcaaggagagctgacagagctaagagcgtcaattctttgtgtgtgtgtgtttgtgtgtatgcatgcatgtgtgtgtgtgtgtgcagttagtgtgcagcgcagggtgggagtacctaatttgatttcttcttagtcacccggagtaacaagaacttctctggcccttggttttctcatctataaaatgggctgggcatgacggtaatcccagaactaggtagtgtgagatagaaaaatcataagttccagggtagcctgtattgcacagtgagtaactgatctcaaaaaatcaaccaaacaaaacagactatcagaagccgagagctgtgctccaaaggataacggtggtagtttctgtggattcatccagactgagtgcctactatgtgctggagatacacagagaacaaagagacaaggtctctgccctggtggatctgacccagcaatcaaggtgtgaagggaactagacaagagataaagacagtgagtctgtgggtgctagaaggtcactcgtgggttggtgataaataagggagggctaggtggggggcatgctgtttctatacaggatgggtctgacaaaaaagagaaaatgtttatacctaggtgtgggaagtgagctgcatctgccacagtgcctgggggatccagcacaggggcctgttttggctcagcagctccaaaggaggggggtgagagggagcccacagagcctcctgagggactggagatgccctcctatgaacgggtaaaatggcacagtgcagaaggctttcctgagcctctccaggactgagtccacaaccagatagctagccagacatgctctggaatccagatgttttccaagtgtggatgcttcattttaaagagctgtatgctcctcacaccctcgtctcagggggcagcactgtgctgtagaaaggaacacatgcccacttccacaatgacacctgggggacccagaggaaccccacatgctctgtcagatggtgggaatgaggcacgatgttgcttacctccagctacatctgtcaccatgaccaagtcattatcccctctgaacgttggttctcccacctgaaagtggaggcaaacacggccagtttctacaggcctgtgccggaaagaacaggccgaagcaccgagctttgcaatgtgtgaaggtctgtgcacctgtaatcgcaacacctgagagatgaagaagaccaaagagattcaaggtcatcctctcacatggtgccttctaggctagcctgggctacataaaaccctgtcacaagaaaggaagaaaggacggacagatggatgaaaagaaaaaataaagggagtgaggaagaaaagggaaaaacagttggggtttctggaaccttccacgtcagccaatggagagatgaaggaagaaaaccttcccgaagctggcagcctcccatgtaaagtgatggctgcagtttgaggagctccgtcaactgtcagggcaccatcgtttatggaataaagaggccacgtgattgctaagaaatcattacgtgaaatgaatgggggggtctttatagagcaagatcttcatctgaggtgttaggcaagaaataggcctttatgagagaggcttataagtagggggattacagtagcaactatagttgccaaggtcccagcccctgcctccgaccccaggtacctaccagatactaaatcggctttacttagcatgtccaggctggaaatgacaggcaggacctctgagcaggtcggaggcagaggactgagtttagctttgccaccagctgccctgagctaggttctgtcctgcagagcacctaggcctgtgtacagcggcagcctggctactggtaaagggattcacagcattggatcatgaacattttcaaccattccaaaatccataaaaatacttaacattcctggcaaacaggtctggtgcaaaatggcaacttgaagtcatgggaggctatttataattgtgctgcgtcccatgcagggtgggaatgcgagcgtttcatgtgcctaaagcctggcagggctcaccgggagccttggctctggcaaatgtagactgctggctaaggccctgctgacggcgacacagcccacagccagagtccctgatttttaaaaccatcttaactttcattaggatttattttaaaagcaaaataaaaggaagtctcaaaataattggatttctttcaatgtgcagataagacactatggacagtggagcttcttttgtgaaatctttgtctgggcttgctcagtccaagccatgacttttgggagcttggaggatggtgtaggaaaggaaacggccctggaattcttagatgctatcccagcagcgtgggggaggaaatggttaacactcccataccccatggtcctgcagcttccagggtctccaagcagagtcctgggttgggagtttcagaaagtactgggcactggtgaaatgtggctccagaggaggacagggagatgctgagcacagcctgtagggcccagggctaggagggagttcctgggtacctgtgagaagagacaaaatgaatgaaggtaggcggtggacaaagaaagcctgacagtatcctcagacaagccaagaggcaggatgccattagtcttcctctgccagacactaggactcattaagaacatggcttggagattaggcatgtttaggccaagacaaaggtgaaggatcatgaaactgaacttcatcactttacagaccagacagtgggaacaagttgccagcatcacacaatagactcagtgccacatctacccatgatatatttgtcttatcgtgactgctggaaatacacaggaactgatgtcgcacagagcgcagcagacagctttgccgctggttgtatgggcaacatactcgcatctcggtttcttctatcaaagaacagtaatatctatcaagacaatattagagatttaaactaagaattctcacaagagtgaagaataaaaatgcggatgacagtagtgatggtggtggtggtcatggcagtggcagcagagatgagggcggcggtatagttggatttctatcaatgtgcagataagacactagagctatggacatgagggtggtggtgggcaagcatggtggcaagagagagagagagagaaatgtttatacctaggtgtgagaagtgagctgaatctgccactgagtgcctgggggatccagcaaaggggcctttggctcagcagctacaaaggaggagggagagaggaagcccacagagcctcatggaggactgaagctgccctcctatgaacgaggcagtgaccgaggtgatgtgagaacaatgaccatggtgatggtggacgtggcaacagggacaacggtggtgtgatgactgtggggctgaggatggtggtggtgggagcaggaacgatggtggtggtggtgacggtgatgatggtactgaggataatggcagcagtgatgatggtcatgctgacacagatgaaggtagtagtagtgagaataatggtgatagcatcaacggtgatgatagtggtagttacggcagtgatggttatagtgacagtgatggagagaaaggaaatacggttcatctgaggaccaaacaggatgagccacaccctggaatgcacaggcatctctctcaacagatcaccttcctttgtaatgtattattattggtgtgtgtgtgtgtgtgtgtgtgtgtgtgtgtgtgtgtgtgtgtgtgtgtgaaagaattcagaagacaacgtttgggaatcagttctctcctcccaccgtatggaggcaacgtctctcgtttctgctgctgcactgtgaactccaggcaagctggaccctgagcttctgagcaaatctctctgccactcttgcattgggcatgctggcattgcagatgagcacacggcatctgacttgataatgtaggttctggggtggaactcaagtctttgggcttgcatggcgaacacatttctcatactttcctctttagaatggcagtttgtgttcattgttcagtctttcctaagaaaattctctgagcaggcacaatactgttctgtgtggtgtctacacatggggtctgggattatcaaacccaggctctccttccttccttcctccctccctccctttcttccttccttccttcctccctccctccctccctcccttgnnnnnnnnnnnnnnnnnnnnnnnnnnnnnnnnnnnnnnnnnnnnnnnnnnnnnnnnnnnnnnnnnnnnnnnnnnnnnnnnnnnnnnnnnnnnnnnnnnnnnnnnnnnnnnnnnnnnnnnnnnnnnnnnnnnnnnnnnnnnnnnnnnnnnnnnnnnnnnnnnnnnnnnnnnnnnnnnnnnnnnnnnnnnnnnnnnnnnnnnnnnnnnnnnnnnnnnnnnnnnnnnnnnnnnnnnnnnnnnnnnnnnnnnnnnnnnnnnnnnnnnnnnnnnnnnnnnnnnnnnnnnnnnnnnggtttctctgtgtagccctggttgtcctggaactcactctgtagaccaggttggccttgaactcagaaatctgcctgcctctgcctcccaagtgctgggattaaaggcgtgcgccaccactgcccggcactgtctgtctttttaaactaacatgatgaccttgacccctgattcttctgcctccactgccccagaactaggattgtaagaatgcgccaactcatccggcttatgtggtactggggacagaacttgggaccttgtggatgtgaagcaagcattctgccaactgagctacattcctaagccctgacattgctattttttaaaaacaaaagtgtgcttctacgtgtatggcacaccatagcatgtgtgtgtgggatcagagaacaactctttccgccatatgggacccaaggattgaagtcaggtcactagccttggcacaagtacctgtccttaatgaattctcactttacttttgagagcccttactttacttttgagacagtacttctcaccagcctggagcttgccttgtaggccaagctggcttgccagggtccccaggaatctgcctatctctccctaccagaattaggattagggatacagcacatgcacaatgtctgatatttacacatgagctgtggggcagaacgaacatcctcatgcttgcaagacaaacacgttcctgactgagccagccactcattggcactgcccctccaaacagttcacaccctccccgtgccagtgtgattcactgtcctttattctgctccattttcgtcttaacaagaatgcttgcattgctatacagggacagacagagtgaggagtccctgtgggcaatgaagctagtgtatatcttgattgcaatggaggtcatgcatgtggtgtgtgttaacattcacagaatcgtgcactaaagaaaaatcaattccaattgtgtatccattgagaaaacaaattttaaagagagagtgaattgacagctgcggcccactaaattgatttcataaccacgttgggtcctaagctacagcatgaaaatccctgccctgaatctccgtgacagacagtggggtggggaggcagtcgggcaggggagcgggaaaaggagcgtcccattctgatctacttctcccttttccacagcggctttctgcctcggacagtctggaaggggtggcctaggtaagaaagaacaggatcaaggaaggcttcgtaggctacatgaggatttgctaaaaacctgcctcctccgtcaatgtgaactccgcctcttgcaaacacacatcagccatgccagtgcatgtataggcagcacccttcataatcactacacgagtgctagctagcatgccccccaccctactctgtgggcaggaaacagacccacccacaaatgcacctcacgaagccttgtttcctctctggtcctccgtcatggacacttgcagataggccgtgagaaaggttgtgtcagattgcaaagagcagagcgtctatacctcaatcttagaagccaccatttctcaagcggttgggccacacagcatctcctactggacactaacaatgtacactggcttagtgaaggctccgagactcccgcagtacagaagcctgttgatttagttctccatgccgggggtgattcccagggccttttgcgtgctggacaggtgctctactattgagctacattcccagacctaaacatcatttaagttgaccgtctccacattcattgtcccatctccactttaacctggataacactgtgctgaatttatctgaagagagatgagagccttgtaaaaccaccatatagcatcaggggcgttaataggccccgggtcagaccgtgggcccttagatgacatcccagcctcaggttctagtaagtcacttcctgcctgagcctcacctgcccacctacagaagagaagaaaatatctttctctggaggactccatgaggtgcttaccaagccaggagcacatgaagtatctacagtgattagatgtgaaaccggtcctctccatccagctagctggtgaccttggtcagccacagccctgctctctgtgcttcacacatccccaagagcaggaaggaaaagaaaggcagcctggccagtggctctaagccaaagacaagtccgagaagccttttcgtttttaaatgtgttgcttgagtgagcaataaatctgctcagctcaaagtttcctatgacaagatcagctgctaaattcactcctgtctctgctcctcacctgtccttcctgcctctcacccaacaccccaggtaatgactgtgttatatatcctcccagaatctctttgtgtacatacacacacacacacacaaagagagagacagagacagagatagagagatagaatgagacagagagagacgaactgatggacagccagagtcagagagacacagggacagagacacaaagacgcagagatatacagaaaaacagaaagagagggaacacactatctgtggcttcaaataagtgaagaacaaaaatgaggcaggatcaaaaatgagatggctcagtgtgtagaatgctagccttgcaagcaagaggacgtgaatgtggttccagaacgcaaaaagaaaacccagacaccatgggcataaaggcaggcaggcccctgggactcactagtcagcttcagaccactagaaaacactgcctcaaaaatatagacggtgcctgaggaacaacacacacaaactacatgaacagtcaggcttggactcatacaactgcctttcgtgtcaatgttaccccaacagtacagaaacacaatcatttacacagttttgcaatgtattagaattctaaataccttagagatgacagcatacagaggatgtatgtaggtcaggtgcagacactttgccatcttgtttgttgttgcagtgttggggatggaactcacggccccgagtatgtaaaaccaagctctactactgagctacatatatctccagccccttcccacttgggagcagggggtggttagcttgcttgcttgtttgtttgacagctgcgtggtccacactggcctcaaactcaccaagttttacctcggtgctgagatgacaggcatgtgccaccttgcctggtcctagaccatttatgtgaggaacctaagcatctgtgagttctagtaaccacaagaggtcctagaagcatttcctatgggtcccaagggggcatttctatatataatacagtctttccccccatcatcaagcttcataaactcacaaaaccaggagcctgccttataacctagaaatttctctttaaggtgtttactcaagagaaatggaaataggagcctacgtgccagcctgcacatgtaaatttataatcattttgatacatggccggcaaacccccaaaacaacccacatgatgatgcatagaaaagaaatggagaaaattcacacaatgaaatgttattccacagaaattaaaaaaaaaaaaaagacacaaactactgatctaccaaggaacacacataaaccacaaatatacacagagggcaagaggccacagcaaatggccatctgtgatttaattcaatcatgtgaccatgtacaagagcaggaactagtccttcatggtagagggcagggcagtccttccctgaggctggagccagggaaatgaactggccattgaggagcgagcacgatgtgtctagatgacagacaggctctgtatcgagatcacacactagccatgagcttgtgcatgctcatcagcttccacagaaccctgacaatgagtgtatcttaccgtatgagaggcgtgcctccgtaccgttttcaatgttttgtttcattgagacagggtcttctgtaccccaggctgtcctcacactcactgtgatgctgaggatggccttgaactagttctccttcctccactgccaagtcctgggactgcagacatgaacaccacacccagctaatacaggtgatttaagacaaagaggtcctgggagaaagagccagggagaaggcacagtccagtaaagagctggtgcacgaggacccgagttcaattctcagagcccacattaaaaaaaaaaaaaagacctagtggcagcagtggtgcacacccttaatcctatcgctcaagaggcagagacaggcagatctctgtgagttcaaggccagtctgatctacagagtgaatttctggacaacgaggactacccagagagaccctgtcttgaaaaacaaaacaaaaaggcaggacacgatggcgcacttgtaatcctatgctggataggaatagatgtgcagagcttcctgcccagcaggcctaactgaattggtatgtccaagtcctagtgaaagaccatgtctctaaaaagaagatggacatcgagctcctgaggaatgacactcaaaactgacctctgacacacatgtgcacacatgcacacacatctgcatgtatacacagagacaccagatagatatcaggcctcaggcctattgagacagaacttccaaggttggggggggggggattttgttggacagaaggcgcaggacatcttgtccacagtcccatggttccctctaactcaaaaacctgagcatacacagcatagggccaacacagcgacctgcctgagttcctaggaagctccaaccatgccctaaagggggagggagggaaggtcaggaggggaagtgagagctgagctccccctccatcacctgatgcctcccaccacctcttttgatactcagatgtccaggtgatgctaagtggttccaactccaagtgtcagggtcaagtggagatccagatggaaaacaagtggaaaacagtgtgcagttccagttggaggctgagccaggaccattcgaaaaatgcccagctggcctctgcagtgtgcaaacagctgagatgtggtgaccccttggcccttggtcctttcccttcattgaacagaccccagaaccaggtcttctgccaaggatctccgtggtctatatccaactgcaacaacacaagttcacaagaccagtgccttccgctgagcctgatctgcctaggtgggtgataatgtgtgacacactgggctgagacctgggagggtaagtgggtagaaaggggcttcacagttacagagccctgaccacagacaggtaagagaactggctggcaggaataagccaaaggcttatttcaatcttggctccatccatctgccaagattgaagacctggttctgccaaatgccaactttgctgttctttgagcctccattttcctgtctatgatgtgtggcactgccacctcctagggagttgagaagcagaatgggaatggaggtcaagtcagcttactgacaagggacattaaggtcatgagccctgtgtcttcacactgccaccagctcccctcctccttccctttgctccccacttcccacccttgtctgtgtgtttcactgcagagccccagagaacgacacctccacccacaaccaccccacccaccaccgtgccggagcccacaggtaagagggtgctcgggccttgtgggaaaggcagaggatggactggtgcagacaataaagcccaaggaccaggaatgacaaagcctctgcgctcttgaactctcaggatctgcagttatctgtgcagatgaggcccgtcagtattctttaaccaagggaggaagactcatgagatcttacccctccttgagaaaatataaacagttcatggttgtgggggcagagagacattttgttcaatgctgtagtcattggtaaggtgcccatgttcctgtaaatagcccaaattagattcattgaatcaccaaaacaaataaaaactaagaggcccagttacatctgaatttcagtgaaaaggttcaggtgtgtcctatgtaatgtctgggaccctcacctctcaagcagtcatctgttggggttcagcaacaaggcattctgaaaggtatcacactcagccatgcctttctctctccagctcctcccagattgcagctggtgccaggacacgaaggcctgaggtgcacaggtgtggtggaattctacaatggcagctggggtggcaccatcctctacaaggccaaggacaggcccctgggcctggggaacctcatctgtaagtctctgcagtgtggctctttcttgacacatctgtccgggacagaggcagcagggacaccagctcctgcagagctgagggaccccaggcccttgccaattcgatgggaggccccgaacgggagctgtgtctcactacagcagtgcttccagaaaacaacggcccaggagggcggccaggcgctcaccgtcatctgctctggtaagctggactctgaccacgcttcatcaggctatctgttgcctttgagtaaggacatgggatcccctgatctgacattcaagctttatgagaagcctgatggaggtgaaagaggagtggaggcctggagcgatggcctctaaacaatagaacaagttagatgaggtggtgactcaggcaacagagcaactcctgcctagcccaacggagctaccatctggaaaaacagagtcagctgggatcccagcaggaagacgctaaagggaaagtgaggcctgaggaaaggctgagggcacttggaggggtggcctttgccaatggggactttctgaatcttcagaaaggaggctaaggggatggtaagatttgagaaatccctaaggcctggctcagagcaaagctctagaggcagcccctaaaaggctgctttgtctgggttgtgagctacaagaggccagcagtgccggtgcacttgaaatggagacagagggaacgctaaacacatgggaccgtatgggggcccagactgaagaaaccacagttcaaggcaaggcagaataaccaccaagcctgggaaggagtgggtccaagttgctggaggtgcccctgatgcattccaggttctgttgccaatagactactgcatgctgggcatccttcagttttcatcccccaccttgggggtgggaactagtattaccctctttaatggggaagccagggctcaaagaagcttcacttcctcccagtaccacagagcactaggtgagatctgccctcaagcagtgtcaatccagagcctattttccaaaactggactgctcaaggtgtggtccaagacaggtagtattagtgtcacctgaaacagtttcacccctccccacacccctaaggagagccactctcagcaggtccccagaattcctacgcaaatataggatgaatggctcagaagtataaggtccacgagcagggcagcctactccactggagacctgataaaaattggtcttccaggcagtagaagtcccaaggttctctgggccagatgagaggctctcggctgcctccagccccacccactcctcaagctctcatgcaggctacaacctgcaaagccatgcctggggtcttgctttgaagtttcttctaaatagaagagtcaccggggctttgaaggtgggtgttgccatggaaactagccaaagctggtaagctcactattgactttcaaccaagcatagtagcttctgcctcagattcccaagccccaccctgattagcagactgaattcctctctagatacctggcatcatggccaaaagcctataatccacagggttaggggctggggcggcggaattcctgggttctgtcccaccagtgaagcacaccagctctttccagtccccaggccttagtttcctcttctaaaaagccctccctcatcctaagcaagagagtaaaaaggcatggcatggccacgctgcctgctcctttgccactgttgtcttgagatagctgccaagctcctttgccactgttttcttgaaatagctgccaccagccacccagaggccccagggacaagacagagcttggtcggagaagtgctagagaggatgtgccgtgctcgacattgccaagcccccacctcaccagcccttcctttctgcagatttccagcccaaggttcagagccgcctggtcgggggcagcagtgtgtgtgagggcatcgctgaagtgcgccagagatcacagtgggaggccctgtgtgacagttctgcagccaggggccggggacggtgggaagagctatgtcgggagcagcagtgtggcgacctcatctccttccacacggtggatgctgacaaaacctcccccgggttcctctgtgcccaggagaagctgtctcagtgttaccatctccagaaaaaaaaacactgcaacaagagggtattcgtcacatgtgagttgactgcagagggcagtgaaagacttttcctctggaacctagtcagtgaacatagctctaaagagcagatctggaaggcagaaaaggcttctgggaaaaggagagtaaatgggattctgggagcaaaaatcagcaatgatgagtagagcaggcaaggctcacgtggacctctgtcaagctactgagacatgccaggactctcccttcccttctatctcctgctttcccgagatgcaagctagaaaattagggaggggtgggtgaaacatacttaatatttgaatggtaactgaataatatctaagagaaattggtacatggatgggtgacatgaatggagggtggatggatagggacatggaatggaggtagatgggtggatggatagatgggtgaatatacaatggttgtataaacagatggataaacagtggatggatggatggatggatggatggatggatgtttgtataaacagatgaatcaatgggacagtagatggatggatagattaatggtagatacataagcagatagatgggtaatagatacatgactgaagggaaggagggatgaatagatggatgaatagatgacagataggtggttgaactaatggatgactggctggttcttgatatgtggtcatgtatggtcatcttcctgatggtaggtaatggaaggctgattaatctaagtatgaagataaaaagttaacagctgataacaagagtggcaaatggtagttggatggtcactgaaggtgataaactgtagacgactgaatagatagcaaagactcctagagatggccagagagtcagccaaatagacagctctgctttgaacacactggtgggttgataggaagtgccaaggtactagggcaattgaagcagtcactccctctgagttgctccccagggctggatctgatttaagactcccccctatccaggccaagacccaaacccagcaggcctggccccaggcactgtggcaagcatcatcctgacccttgtactcctggtggtgctgctggccatgtgtggtcctctggtctacaagaagctggtgaagaaatgtaggtaccaaaccccaagccttcctccctcaccacccatgcctacctcctgctgcccactagccttttcctgtctaaagtattagaaagtcaggatagattgtaccttctgatttgcccttgtctggacttggcaaaaaccaactgcagttgatgaaagccatggccacatgacatcagcacagcctctgatgtgacaagatgtaggccaagaccagttccacagctaccaatgaccactgagtgtgctgctgcctccaccagagcctcagtttccctgtttactgaaagcggcataccttatgaataaggcttgcctcctggccttgcaaatcttagagaaattacccagaggcaaggaaggaagataaagaagaacagaggcaatagtgttgggtccccagtgccctctgaggttatccattctggtcctaaataaacccttggtcatttttatggggacccaatggcttcaatctctttccctagtcagttaggaaatgaggtggaaggcctggagtggtagaccccatcagtcctgcctccagggcatctgcgtcttccctcccccagccccccacaccccttcactaccatctggcctcatgagcttcctgtctgttgcccagttcgtcagaaaaagcagcgtcagtggattggccccacaggagtgaaccagaacagtaagtgttcccaggagcgggtgtccctcagccccaggactcaggccaacagagcagagtcaaggtgtctgctgagccagcaacccagcagctgctagtggcctctggtctccaccacatttcactaaggtgtgactgaggtcaatgtatgtccccacaccaaagacgagtgaggcttcttttaggggtaagtggttctgtgtaattggcctcttgagcctcagacaccgcagtctcttgccttgtggccaacttaagcagagattctcccgcccccctcccccccatcccttccttccatggtcaaacagtgctaagcaaagccacgcacagttgtctagttcaggacttaccagagccttttttgtggctcctcttcaaagtaggaaggcatgacaaaggactggccaagctagttttagcaccgaacagcttcagagggtgttttagaatccactgaccctgccgccctccccctccctagccttcactcccctgggcacagtcagagctaccctaatgggggggagcacgcacttggttcccctcccctttccatgtgcaggcccaaatctttctaggaggttctcagttttattcggttttaaagactacaaaaggcctcagcccctgatgagtaggacaatctccctagcaccagtgctccagctgcctgctaggtaaaagcctgacagctgaggggcacctggaggcctccctccctggctaatcagattgctgtgcgagcctgcggctgactctgggccccccgaatcccccctgccctgcccccggagagaaaggaaggggaagcgtaccacccctttcccatgacctaatgggaacaggaagctaagcaatgggaccttgcttgggaaggacagcacgctgattctgacaatgtcaccggcctcctgtgtctgctcagtgtctttccatcgaagccacacagcaactgtgcggtcccaagttgagaacccaacagcctctcatgtggacaatgaatacagccagcctcccaggaactctcacctgtctgcttatccaggtgaggggggggggggctgttgggcagccggcctggtgggagagagggcacatgcggtgtggaagtgctgaccttgaagtttttgtgcttttccaaagagggaaagggaggctccagggggtggaggatgagactgcctacttgacagctggtcccagcagggtggtggcagggatgcagccttcacaggtctctgctgtccctttggagaccttgaaaccctcatctagagagaagaatgcagttggatggatgccattaaccccagccttgctgtgacctaatgggcctgtttgcctgcgggccctgaggggctagaagataaatgagcccctcagatctctctgagccaggacggagccattaagtggtccacaggagcctccaatacttggctcctcacaggcactcacaattaagtcccagggggcctgaagttcagcatcattagtgaacacttggccagtctgatcaaaactgatacaggcctgtcaccatctcagaaaacctctgtgatcttgctacccactcatctcctggggttttgtgcagcctccaggacctctttaataggtaatcctttctctctagctctggaaggagccctacaccgatcttctacacaacctgacaactcctctgacagtgactatgacctgcaagtggctcagagactgtaaaaggtgagcccacccctgcctggtgcttgacacccagggaaccagcacctccactgtccataatggacagaggcccctagaatattcttcacataacaggggtgggggggagtgaaccagtctgccatcccaacacctaggaagagtcataagtttaaggtgaatctagtccacatagctagttccaggccagccagagatacatagcaagcctgtctcaaaagaaaagaaaaatacagagatagatatatagatatatacatatacacacacacacacaccccatcaacaacaacaaacaacaatttacataatggagccacctgagcgaatggtggaagaatcactgatcttaaagccatcctgtgaaattccatcatgaaaagccactgaaaatatttaaagagctggggagacagctgtcagcaaagcagcggcttacaagcaggcaggcctgagtgtgaaactctaaacccatatttaaaacaaacaaacaaacaaacaaacaaagctaggtatcatggcatacactttataatcccagccatggtgtggtgggagacagagacagaccctagcatttgctagcttagtctatgtggccaagtttcaggccaatggcagatcctgcctccaacagaaagtagaagaggcttccaaaatacctaaggctgtctgtcctctaagctccacatgcaagtgcacacgtatgttctctctctctctctctctctcacacacacacacacacacacacacacaaacacacacaagggttcatgagaaatcacagcctccagatccactatgcctcgagcaaggagaactccctagcaccactgagcagctttcccaaacagagcccaaagcccatgtccagccttgggtttccctccacagcgccagtgtctacgcttggacatttgtcctttgtacctcacttgaggtcatcaatgaaggccaagagcatcccctccatcctgaggaagcctttaccactttgagtgctgcccacttccacttcagccagaacctggacagaagccaaggtcctctggacaagatcgcgggccctgcagtggcaggccagctcccatatcccctatggccacggcagcctgactgcttcctgcaagagccaacactcagcagacagagcctacgagcaaccaatccttgcagagactccagtatccaggagtcccaatcctctaggagccactgtgaccagtggggttggctttctccttggactctgacgccattgaacaaatgaggaggcgatacacccaagtggggtacttacaaggacttatttctcaagtgtatttttaatatattctttgtaaataa

SEQ ID NO: 32 - DNA, 1947 bp, Mus musculus
ttatccatggactcccacgaagtgctgctggctgccacatacctgctgggaacgctggcggctttctgcctcggacagtctggaaggggtggcctagatgtccaggtgatgctaagtggttccaactccaagtgtcagggtcaagtggagatccagatggaaaacaagtggaaaacagtgtgcagttccagttggaggctgagccaggaccattcgaaaaatgcccagctggcctctgcagtgtgcaaacagctgagatgtggtgaccccttggcccttggtcctttcccttcattgaacagaccccagaaccaggtcttctgccaaggatctccgtggtctatatccaactgcaacaacacaagttcacaagaccagtgccttccgctgagcctgatctgcctagagccccagagaacgacacctccacccacaaccaccccacccaccaccgtgccggagcccacagctcctcccagattgcagctggtgccaggacacgaaggcctgaggtgcacaggtgtggtggaattctacaatggcagctggggtggcaccatcctctacaaggccaaggacaggcccctgggcctggggaacctcatctgtaagtctctgcagtgtggctctttcttgacacatctgtccgggacagaggcagcagggacaccagctcctgcagagctgagggaccccaggcccttgccaattcgatgggaggccccgaacgggagctgtgtctcactacagcagtgcttccagaaaacaacggcccaggagggcggccaggcgctcaccgtcatctgctctgatttccagcccaaggttcagagccgcctggtcgggggcagcagtgtgtgtgagggcatcgctgaagtgcgccagagatcacagtgggaggccctgtgtgacagttctgcagccaggggccggggacggtgggaagagctatgtcgggagcagcagtgtggcgacctcatctccttccacacggtggatgctgacaaaacctcccccgggttcctctgtgcccaggagaagctgtctcagtgttaccatctccagaaaaaaaaacactgcaacaagagggtattcgtcacatgccaagacccaaacccagcaggcctggccccaggcactgtggcaagcatcatcctgacccttgtactcctggtggtgctgctggccatgtgtggtcctctggtctacaagaagctggtgaagaaatttcgtcagaaaaagcagcgtcagtggattggccccacaggagtgaaccagaacatgtctttccatcgaagccacacagcaactgtgcggtcccaagttgagaacccaacagcctctcatgtggacaatgaatacagccagcctcccaggaactctcacctgtctgcttatccagctctggaaggagccctacaccgatcttctacacaacctgacaactcctctgacagtgactatgacctgcaagtggctcagagactgtaaaagcgccagtgtctacgcttggacatttgtcctttgtacctcacttgaggtcatcaatgaaggccaagagcatcccctccatcctgaggaagcctttaccactttgagtgctgcccacttccacttcagccagaacctggacagaagccaaggtcctctggacaagatcgcgggccctgcagtggcaggccagctcccatatcccctatggccacggcagcctgactgcttcctgcaagagccaacactcagcagacagagcctacgagcaaccaatccttgcagagactccagtatccaggagtcccaatcctctaggagccactgtgaccagtggggttggctttctccttggactctgacgccattgaacaaatgaggaggcgatacacccaagtggggtacttacaaggacttatttctcaagtgtatttttaatatattctttgtaaataa

SEQ ID NO: 33 - protein, 492 aa, Mus musculus
MDSHEVLLAATYLLGTLAAFCLGQSGRGGLDVQVMLSGSNSKCQGQVEIQMENKWKTVCSSSWRLSQDHSKNAQLASAVCKQLRCGDPLALGPFPSLNRPQNQVFCQGSPWSISNCNNTSSQDQCLPLSLICLEPQRTTPPPTTTPPTTVPEPTAPPRLQLVPGHEGLRCTGVVEFYNGSWGGTILYKAKDRPLGLGNLICKSLQCGSFLTHLSGTEAAGTPAPAELRDPRPLPIRWEAPNGSCVSLQQCFQKTTAQEGGQALTVICSDFQPKVQSRLVGGSSVCEGIAEVRQRSQWEALCDSSARRGRWEELCREQQCGDLISFHTVDADKTSPGFLCAQEKLSQCYHLQKKKHCNKRVFVTCQDPNPAGLAPGTVASIILTLVLLVVLLAMCGPLVYKKLVKKFRQKKQRQWIGPTGVNQNMSFHRSHTATVRSQVENPTASHVDNEYSQPPRNSHLSAYPALEGALHRSSTQPDNSSDSDYDLQVAQRL

SEQ ID NO: 34 - DNA, 25074 bp, Homo sapiens
gagatacccggccagacaccctcacctgcggtgcccagctgcccaggctgaggcaagagaaggccagaaaccatgcccatggggtctctgcaaccgctggccaccttgtacctgctggggatgctgggtgagtacccctcccaggtgtcctgcgaacacccgggctcgctccagtgcaaggaaggagttcccagttttacccaaggctgactctgggatccacatgtcagccctctggagcgttgtggagatttggggccactgggatccctgcctgcccccactaagccgcagcttggccctctgtcctgcatgtcccacccgccaggagcacaaccttgcctctctcatgcgctgttgagaaccctgctttacccttccagtgcaagagagactgcaggggggacccgcatttgatggggcccagacaacttgattcctaggctgagttggattttagcagagcattcaggcctccctctgcgaggtcccccactgacagcccagcctttacttggtcgcctccagagacatggaaactcgccgtctccgaggcagctctgatgatgctctggacagacagtgggccgaggcagggtggagccgcctctgaggacgatgtctgagcaaatgtcaaggactcatagcggaagtcctaggccctctcatgcccagtcctgggtcagtcccagaggggcccagccaggccggctgggatgagtacacgctgggcctgctctcactccagccctgggttgtaagcccaaccctgtgtgacctcggataggtccccaagcctctccaggccttgatctccccatttatgaaatgtgggggttgggggtgtgaactggatgaggcctgacccacttcctgaggatttagaaggtctggcagggtgacagaggtgcgtgactctgggctggaaacaggaggatgcgagcagcttccaggctggcagggagagggtccggaggccttgcctgcctgagcagggagcctcagcagccttctagggaaaccgggtgtgcaggtgtgagtgtgggggaatgcatgtgtgtgtgtctgtgtgcatgtgtgtgagaactgtgtgtgggggaatgtgtgagtctatgtgtgtctgtgtgagtctgtgtgtacgtgtgtgagaactgtgttggggggtaatgtgtgactctgtgtgtgagtctgtgtgtgagtctctgggcatgtgtgtgagtactgtgtgtaggggaatgtgtgagtctgtgtgtgagtctgtgtgtgagtctctgggcatgtgtgtgagtactgtctgggggggaatgtgtgagtctgtgtgtgagtctctgggcatgtgtgtgagtactgtgtgggggggaatgtgtgagtctgtgtgtgagtctgtgtgtgagtctctgggcatgtgtgtgagtactgtgtgtggggggggaatgtgtgactctgtgtgtgagtctctgggcatgtgtgtgagtattttgtgggggggaaagtgtgagtctgtgcgtgtgagtctgtgtgtgagtctgtgttcatgtgtgtgagaactgtgtatgggggaatgtgtgagtctgtgtgtgagtctgtgtgtgagtctctgggcatgtgtgtgagtactgtgtggggggaatgtgtgagtctgtgtgtgagtctgtgtgtgagtctgtgtgtgggagtctgtgcgcatgtgtgtgagaactgtgtgtgtgtgctttcatgagcacaatgcggcctccaaaggcaggattatctccccaacacatgtgacaatggcacctgtgcacacatgttcacatggttcttctcacatgtaacaacaacaggtacaaaatgccttctgtcccaaagtaagaggcctgagacagacctctggctggcttcagggaccctgctaaggagggaccaggcccttaaaccccccacctgctcctcacctctggcctcagacttcattgagatagggcggctcccagctgagtatgggaacccgtgtcctgctctagggccctcccaactgaatcccatcatgggtgaggctcctgatggcaccaggcaagtcccctggcccaacacaggccacagtcaggaagacttggaggtagccccttcaccccagtatggggacctccttgaaccccaggaatactcagttcccagtgtctgagtgagccggtgggtaccaagcattccctttgttcagtgggtaacggtttacaaagcacttttaaagccattttctgctgcaagcttcacaacagccaatgaagtaggtgggcccattggccccattttacagtggggaaaagcgaggcccaggaaggccgagtgcaaacccagggtgcagcagctggtgcacagccgagctgaccccagcccagcattcctgccttcacagaggcccctcccttagctaaaagggaaggccaccaaaggcacttccgtgtgcaggaaaatggccctgggacacaacctccaccagcagagatacagccaccagagctggggacaccaagggccagggttgctggagtcaaacagtgcaggcaccctttgagccattccaaggagagaggcagcaatgccagagccctggggacaccacagcctcctggctggcatcggggcttggggacctttggatcctgaggcatgaagatgcccccagcaggcctgggtgctagtgacaggccagggcttcccacagttgctcccctctcagccccagcctgcctggacagctgctggcagtgaggcggggaagcggctctaacacaaactgcacgtccctgactggcctagccgatgcgactctgaaagccagcactgggacgtgggaaagtcatggactctgcagtttgaattccagtctgccacttaccaactgggcgaccttggactagttctgtaagcctcagttttctcatccgtaaactgggtgcaacagtacctcatagaggcttataaggattcaatgaatcaatgcacacagagcttaagtacaatcctggcatatagtatagtaagtactcaataaacaataataacagcaacaactatgattattattattaccagggtcagcaagaaacaatgcgaggtaggagccaatggggaggagggtcttgccagaggcctgcacagccgtcaatctctctacccctcaatcctcttgcacaggctatttattcactaattcattcatttttcatctacaaatattattgagcatctcctgtgcatccagctctgtgcaaaacactggggatacagggaccaaggcaggagtccctgccctcaaggatttgatcagctaacaggagagctgttagagaacacaagtaaacaagcaccaaagaccgggcatggtggctcatgcctgtaatcccagcacttcgggaggccaagacgggtggatcacctgaggtcagaagttcaagaccagcctggccaacatggtgaaacctcatctctactaaaaatacaaaaattagccgggagtggtggcacgcacctgtaatgccagctactcaggaggctgaggcaggagaaccgcttgaacctgggaggcggaggttgcggtgagccgagatcgcgccattgcactccagcctgggcaacagagcaagactccatctcaaaaaaaaaaaaaaaaaaaaggcacccgaaatatttacacattttgaaatactgagtgcaatgaggagaacagcaagttcctcaggcacaatacagtctgcactaggataggaggacatccctttggctgggcaggcagggagggcctctctaaggaggcgaggtctcatctgagaatccgagacctgaatgagggacggagccagccaggcagagaaaaaagggaagagggtcccaggcagagcggatggcagggcaaaggcaagggggaaggacaggcctgagagggtggggctcctactgggagcagggcagcaggcccactgtcccaggctgggcgaggccctggttggatcatcctcctcgaagacccagagctccccacctccagcagggaatgaagggacctgggggcccaggaagggacctggccttcctgggtcactctgtcaccatcagttcagaggggttttccctgcagtgaccaggcggcgaattcagctcaacctgacaaaattgattgaacatctattctgtgtgtgtgtgtgaaattgaacatctactgtgtgtgtgtgtgtccatgtgctgtgtttgcgtatgaacacatatgtgcacagccctgtggaggggagctttggagcaatgcagacctagtttgatttctgcttggccacccacaagtgaacatctctcagggtctcatctataaaaataggggttccttgctgtgtccacctcaaaagatcactgcaataattacatcgggtttattcagagactaggtatggattgaacacctactatgtgccagatgctgttctaagtgctgaggacacagcagtgaacaaaacggtggaaaatccctgccctggtggatctggcataatagtcagggtgtgatggggagacaaacaagacacaagctaagctagtgattatgcgaatactagacggtcatgagaggtgtggagacagacagatagaggagggctgggaccggaagccttggtggggtgtgaggtacctggggaggattcagcggctctcatgagaagatgatatttgagtcaatatttgaaagaagggagtgagcccaccgtgtgggacctgaggagaagcgttgcaggcagaggggcctccagctgcaggtcagtgggggatcgatgaggcagccacgagggccacggatgcccccgtgaggacttgggctttttctcccatgcactggacagccacacaggagcagagaggtgagcataactctcacctctccaggtcctcaagtgcatcttgaaccccaggccagatgcatttggaactccagaagctttcagattgtagaaggaaatactgtgtacatactgtgtgctcttaacacacgcagtgaggcctggggcagcaccctgcgttcaacacattcccatttctgcagtgaaacatgaatttgcacacttagagggatgtaaagacagcaaacaccctcccaccaaatgcattagaacaagacttttagattctggattttgaattgcagataagagactgtgggcctggatcacttcttctatagctaccactatcaccgtgaccagcatcatcatcaccatcatgtacctttcaaggcctgactttcatggtgtccagagggaccctaatactcctctccgggggacagatacggtaggaatagcgtaggaaatgggtggtggcagtctgcagagacgacaagggtcccatgcactgccacagattcccacagagacatctggaatgaacccctccctccttctggccccagtttcccccatctgtactccagagcaagcaggctctggggcctccctggggtagactcccacaggccctgtcaggtgatggagacagggtttctctcctgactctaccaccagctagctgtgtgaccttgggcaagtcactcagcctctctgaacctcggtttcctgatctgaaaatggaggtgagcatggtcccttcttcacagggctgtgggtagaaagaacaagtctagtgcatgagagagctttggggtaggtaaagctctaaacaaaaccaaagccttgtctctgtgacagcagagacaccgtatatggtgcgaaactcatgcaacagcagactactagtgggagagagaaataacaattcaaacagcaaaggtcattctgcccacgacccactgtccgctcactgggacaggccctgggtgagccagattagagacctgaatctgctgttccttcctgcgggctccattcccaggcctctcctggtgtaagcccagtgtgactctatatgtgttttgcacataaaagccgcctaatcataaaccaatcatttcatctgtgctcaacccaagaaagggaattttggtcctttacgaccttcgtttccctaaagccctgatacagctccaactctacagatgactgtcgtttcagaaaagaggggcttctgacctttcaagtcagccaacatataggattcgaggaaggaaaatccagaatcctacccaaaacacaggcagatctattgtatttcatggacatcgatggctgtagctatggggaggtctgtggactgttagaaggaatcactgtttacgggaaaaagggaacacctgacttgcaaactacactaaatcagtcataggtgttttatctgtggaacaaagtggtgatagcaccccgtcttctgaggctctagaaagaaatggggtcttctgtgaaaaatccttgtcctggggtctgcacagggtaaggatgctgtcattttattatcatcggtcattatcacaggcctgtgaatccgggtgcctgccaaaccctaagcaggccacacccttgcctccatttcccagggtgcaggggcggcaggacctaggagtgagccagaggcaggggccaggagtgcaggttacaaagccagccgccctgggctgaattctggccctgccgagttctcactcccatgcaccacgacagcctcctcctctgtaaactgggacccatcatgcaagtcaacaaatattcatctgtaattccaaagcccaaaaaacatttgtaagtttctggcaaatgcatttggtgcaaatcctgacctgaacgaatgggaggctatttataatcttgacacatcccccttagtgtgaaactgcatatgtttcgctgcagacactgccatgtgtttgaagccaggtctctccacacacatggcgaccgtaaggtgccagcgaggcgtggacgaaacagaagtcaagggccaccgccactgcctggggcctccagagatgcagccagtggagccaggatgtcctatttttcaaaaacgcctggatcttgaaatgtgtttaaaaagcaaaacaaaattaaaagaaacctttttttttttaatttggctcaaaaaatttttaaacactgtgcagagcaaataaaactcatgggatgccgtaatgagagccaaagtgagaattatcctgaatactgtgggggcaagaggaatgagagggacagggaggaggatatcctcaccaagacctcagggcaggcagggccaaaaatattgtctctgccaatgcaaagacaagagacgggagctccaggggtgtgataagccgtctgacttctttagccctgaattttgcctgggtttgcccagtccaggccctaaattgtgggagctgcaaggggaggtgggcaggagaaggaaggggtcttcagagaattctcatccgtagccccagttgctcggggtgaggggtggctggcggataaggaaacggcatagcacttccaggcctcgggggcctcctggtctggagtctcggggattctgtccacagttttggcaatagcaggagcctcaggcttcatgaggctaggaaggatggtgcaggagtaagctgtagagcccccagagggggtcagggagaccctgaacacagaccgcagggctcaggggatggagggtgctggtctgacccctgtgagaagcaactaaaaaatagaaataggttatggaccctcaaaacctcaatgttcattctgctccctagattataagtgaaaaacaaacaagcaaataaaaaaaaaacctgaacatattcatggacaggctgaaagaatatacacaacacactcaggaagcttccaagtcagctgtacatctcaccgccctccctccaccagctgctgaaatccatcaggagctaaagattatagatcacaggtgtttgaaccagggggaaggtgagggactgtggaatctaacttccttactttacagattaagaaactgagcccagagaggctgagtggcttgccaaggtcacacagcacttcatagctaagtcttctcactgcatgttttactgactgaacggaatcacaagttcattccctttgatcaggattgcacaccagggtggtgcaggaatcaatgaaacctggggcaggccatcatgggcttcctgctggagggaagggaggcagtttgggcctcactggcaaaagctcaagactcagtgccaggcggctaggtttgagttcgggccccagcactcattagctgcttggacaagtcatttaacccctctcaagtttcctggtctgtaaaatcgggaccaaaataatagcacctacttcatagcactgtggtgaggactgggagagttaatgtgtaaaaggcccggaagagtgaaaacttttaaagtgttggtgatggtgacagtgatggtgatgatgatggtgacggtgatggtgatgatgatggtgacggtgatagagatggaaggagaggagaggaactgctgctcatctggggaccagacaggcacccagaggaaggttccagggcgacactctagaatgcataaatatcttttttattaaagcatttgttagagcattttttaaagaatttcacttggttctccagcttgttcagtctttcctgagaatgttctctgagcaagacctaggctgttctgtgtggaatctgccaagattgtcaggcccagtccctgtccccaggccttcagggtctggctgcacgagcgcttccaggtcagacccaggtggtgttcatctctgcatctccaaagctggcactctggaggagcaattgggtggctgggagcagagagcatgggttttggagtcagacacatggttcgactccacctgccagccatattacccgggacagggcatttgccctctcctgacatttataccaggaacgtactcaactctcgtgatggggctgtgtggaagattaacaacaatatctgtgatgaaccataccgtgggctaagtatgcagcaggtgctcaacagttggcagctgctgttaataatgaacgttgagtatgatgactcgggaaatagagatgctccttgacctacagtggggttgcctctcaataaacccattgtaagctgaaaacatcctaagtcaaaaattcatttaataccccgacaaacccattgcaaacttgaaaagtcgtaagttgaaccaccctaagtctggaccatctgcgcgaagtttccaagttaggagaaggaagtggtgagccccatggcttggctctctgtgctcctggacagggaatcttcccactgggaaagctccccgagggtctgctgccctgggcacagcttcccccagcccaccctactccacagatcagtagcaccagctctgagcactaggccaggaagcactgggctaagccctttacaccgattagctcatctcatcttcacaacggctctagaaagctagtcccatgctcatcctcatgctatgagtgaggaaatcgtggcttggaggcacagagacaggacagacgtgctccccagactctataggcaggaagtggcagagctgatactcagaactggagcagtagaaagtcatcggtgactgaaaacccatcctgagctgtgtagcactgaagggcagatatttggactcccactccccacaggtggcacttcaagctgccttagccctcgagacttagccagagggatgactccttcaaggcagactgccctgctcctgatgggcagctgggatgagagggaggtgggaatgagaggtcaggagtgagaggtgagggcaggacaaaagggcctccttcctgatttctctcgctagctggacatctccctgatggcctcctgaggctgccctgcccactgcaatagatcagatgattggctgggcgcggtggctcatgcttgtaatcccagcactttgggaggctgaggggggtggatcacctgaggtcaggagttcaagaccagcctggccaacatggtgaaacctcatctctactaaaagtacaaaaattagtcgggcgtggtggtgcatgtctgtagtcccagctactcgggaggttgaggcaggagaattgcttgaaccagggaggcagtggttatagtgagccaagatcatgccactgcattccagactgggcaagagaggaagactctgtttcaaaaaaaaaagaaaaaattgatcagacgattgacaactagaccatccttttccacccaggccagagctctgtacacttccctgttggtgagaataaccttccccttccaaggcccgtgactcctagagcaacagccacgaaaggatcttgcagattcaggggaaacttatcacatggccatgatgacttcattacaaagagtcttgattcggggacaaggatgaactgtggagcacatcaccccttaaaattcaaccgccagcttgagaacactcaagcaagaacagctttttcaaagcacacctattttttaagagacggggtcttgctatgttgtccaggctggactcgaactccttggctcaagtgatcttcctgcctcagcctgctgagtagctgggactacggccttgagccattggcccagctaaacacacctattttttaacaccaagcaaaaatttctcacaaacaatttgaacacagcctttcactattaatatataaagcagtctccttgacccagtgccgtaaatccaagagtaaacccaagtcggacagatggaaatcaaaataccgtacttgcacctaactgatcacgctaggtggtgaatacagaggttaagctttgaagccacgtgagcttgctacttcacctcgtccccacccaaattaaacctcttccccagccacagatgagctgctctgctgagagccccgcaatgggcaactttgcccccgctccacagtgagaccaggctacaaggaggcagagcttccacgtggtccacatgggggaaggctggttccctgcagacccgtgttccctgggcctgtcgccttggctcccttgtcaactagctggctacactactgtgggcaggtcacgccatctctttgagcttggtcttctccagaaatgggcagctgttaaagataagtggctgtcattcttatcctgccttgggaatgctagaaagtagcaaatgttctcttggttccctttcttgctcatttctttctttccttttttttttcttgtaaagacagaatctcactctctcacccagtctggagtatagtggtgcaatctcagctcactgcagcctccacctcccaggttcaagcaattctcctgcctcagcctccagaggagctgggattacaggcatgcatcaccacgccgagctaatttttgttatttttagtagagacagggtttcaccatattggctaggccagtctcaaactcctgacctcaagtgatccccccacctcggcctcccaaagtgcttggattataggcatgggccaccgtgcccggcccctttctggatcatttctccattctctagaactaaggagctcaaacttttttgagtggaaacatgcgggacatttttacattgcaacccccaacacacaaaaagtgatcagtgcattctgacattctcttttttatttatttaaaacaaaacaaacaaaaaaaaacagggtcttactctgtcacccagctagagtgctgtggcataatcatagctcactgcagggtccaacttctgggctcaagcggtcctcccaccttggcccccttaagtgctgggattgcagtcataagccaccgtgcacggcctctctattctactccatttcatttttaaaaaaattgatggcctgagtgctgtggctcacacatgtgaatcccagcacttcaggaagctgatgcacgaggatcacttgagcccaggagttcaaaaccagcctggacaacatagtgagaccccatctctacatacacacacacatacatgcatacatacatacatacacacatacatagtaaaaaaattagccaggcatagtggctcatgcctgtaatcctagctactcaagaggctgaggtgggaggattctttgagccagggaggttgaggctgcagtgagctgtgatcatgccactgcactccagcctgggtgaggagagtgatatcctgtctcaaaaagtaataataataataattgatggttacattattacaaaggttagcatgagggaatttgaggtagggagtaatggaactggtgtataccttgattgtgatggtggtcacacacatctatatatgtgacattcacggaatcatgcagtaaagaaaaatcaatttcacgtctgttcattttaaaagtaacgttttttaagaagaaaaaaaatcgatagttgcagcccactagatagaattcatatcactcaggggttccaacctggagtatgaaaattcctgtccctaaaacccatgatagtggatagggggaggcagaaagggccattgctcgggctgtgggtgggtgagctggggagaagggagagagtgggaggtttcacttcctgaccctcctctcttctttctgcagtcgcttcctgcctcggacggctcagctggtatgacccaggtaaggaagagccacatggagaaaggcctggggcagggggagagtggggctgtggtttcatcaggccatcggggacctctcgatgaagccatcacttctgccagagtgaaccccaccctatagagagagtgaaccccagcatacacacaggcacatagatgcagacactgcacattaagatgctcacatgcaggtgggtgccctcgacagccgtaaatcacccacaaatgccagatctcatgataattattatgacccgctcaccatgcacagaagacatcccagctcataaatgtaccttgcaaagtcttatttcccacccaatcctgacagatgctccatggtcaaagatgtttagagcggagtctgcagagagaggccgcagactgatggtaaagtgtgtggaacgtccagccttagacgttggagtttagtcgtagaggctgtttcccaaatagggttccatggagcatgttggacaaagggcaggcaacaccgcatctcccactgaagactgacagtgtacaccggcccagtaaaggatctgagaaatcctgcagcgaagaaatacatgacactttttaacccagcactttgcacccttatttcaccacagacctctccttcacattgactgggataacatcgtgctgaatgtacctggggagaattgtggctgaagggtcttgagatgccactgtgcagccagagggggtgacaggggccttggcaggccctaagcacgatctgggccctgcactgacatcctagctccaagctttggcacactgcttgacctcttgagcccgtttccccagctgtgaaatgggaagaaaatctcttgcctggtgaagcggcaacgagccagctcgctgggcggacagcctgcaaatcaccccaccaatgttaggtgttgagacgcgctcgttctccctctaaccagccaagtgcccttggcgagccctggccctgagctttggccccagagtgtcctcgtcggaagaaaagggtagcctgacccgtggttcccgaccagggaaaacctccccctcagaatcacctgggagagcctttcacatttctaaaaatttcttgaatcagtgacacattcatccagctcaaaaatttaaaaaaatataaaaagatctgtagtgaagagtctcacttccatctctattcccgtctatcccagtcgcccccgacgtcgaccccaacaccccaggtaatgactacgtttatttgtttcttgcatattcttcaaggagctctttatgcaaatacacacacacacaccccacacagaccccacacacacaccacacatacacacaaccacaccacacacacacaccaccacaaacaccacacacacaccgcacaccacatacacaccccacacacaccaccacaccacacacacacaccaccacacacacaccccacaccacacacacacacaccacacacaccacacacacaccacacacaccacatgcacactacacaccacacacactacaccacacagacacacacaccacacacacacatatatttttcccctcatggagtttgataaaatcacacaagacacatgtctacccatgacccagcaattccattcctaggtatttacccaagagaaatggaaacgcccacacaaagacctgtatgtgaatgttcacagcagccttattcatagtaggcaaaacccggaaacaaatcaaatggtgaatggaaaacaaattggcatgtccgtgtagtgaactatcattcggcaataaaaaggaatgaactacttatgcgtccagtgacatagctaaatctcaaatacatgctaagcgaaaaaagccaaatcaaacaaaataaaatccatgctgtatgagtccatgtctatgacattgtagcacaggcaaaactcatcttttgtgacaaaaagcagatcagtgtttgcctgaggctagattcagggaaattaactataaaggggccttagggaactttctagatgatggaaatgttccatatctagattatggtggtggttacatgcatgtatacatttgtcaaattccatcgaacagtatccttaaaatgagtgcatttcactgtatgtaaaattacctcaataaaattttttttttttgagatggaatcttgatctgttacccaggctggagtgcagtggcgcgatcttggctcactgcaacctctgcctcccgggttcaagcaattctcctgcctcagcctcccgagtagctaggattacaggcgcctgccaccacacccagctaatttttggtattttttctttttttagtagagatggggtttcaccatgttggccaggctggtctcaaactcctgacctcaggtgatctgcccgcctcagcttcccaaagtgctgggattacaggcatgagccaccacacctggcctaaaattaatttttaaagatctcttaaaaagcagacaccagccccaatctcagaccccttgagacagaatttccaggacaggggccatcctgctggacagtgggtgccgagaacaccttgcccatttatctgagctcccttctgactctgaaatctggagccccaccctcctgggtctagcttcggggctgcctgggtcagggtcctctgggaagcccctgcagtgccccagaagggacgaagctcacaaggggcaaggcaggcagcccacggggcaggagggagctcaactgggcgtcctagggagagggcagtgaggggtgccagtggggaacccctcccagcctgacccccaccacacctttctgacccccagatttccaggcaaggctcacccgttccaactcgaagtgccagggccagctggaggtctacctcaaggacggatggcacatggtttgcagccagagctggggccggagctccaagcagtgggaggaccccagtcaagcgtcaaaagtctgccagcggctgaactgtggggtgcccttaagccttggccccttccttgtcacctacacacctcagagctcaatcatctgctacggacaactgggctccttctccaactgcagccacagcagaaatgacatgtgtcactctctgggcctgacctgcttaggtgggtaactagccagccacacgggcaccctgggcctgggcgccagccccgaggagactgcccgaggcctgtgatctagggtctgagcaggctggtggaaggggtggggggaccccagtttataaccactccccaagacacatacccaggagggggactggaaggggccagcacccatctgtaggatggcaatggaggacctagttctgccaatcactgacttcatcgtcgcctctgaacctccattctcccatctgtgaagtggggtggtacttcccgcctcgcaggaggcttagagacaacgtgtgggtcaagtggacctggtgtgccaagcggcactcatgccaggagctcctggtcctctcaaggctgctggctgcccccggccctccccacaccacccattcctccctcaccagagtgtctcattgcagaaccccagaagacaacacctccaacgacaaggcccccgcccaccacaactccagagcccacaggtaagaggattctgaaccccccacagggagtcagagctagcaaataaaaacccaggatgcccagttacattggaatttctgacaaaggtggaaatgtttagtattggtgtgttctacgcaatatttgggaccccatcacctcccaaggctaagcgttagtcagtagttgtccacaagttggggccaaacagcaaggagtgcccaggaagccctcggcgctcagggtggctccccctcctgctctctcctctcctagctcctcccaggctgcagctggtggcacagtctggcggccagcactgtgccggcgtggtggagttctacagcggcagcctggggggtaccatcagctatgaggcccaggacaagacccaggacctggagaacttcctctgcaacaacctccagtgtggctccttcttgaagcatctgccagagactgaggcaggcagagcccaagacccaggggagccacgggaacaccagcccttgccaatccaatggaagatccagaactcaagctgtacctccctggagcattgcttcaggaaaatcaagccccagaaaagtggccgagttcttgccctcctttgctcaggtaagtgagacctggccaagccccatgacaccttctgctgccctaggtggggtcacagagcatcccagaaggtcagggaacatgtgtgcagcacagggcactatggagaatacaagggaagtggaggcctggtcttggcctctaagaggtaacaagggttggggtggggaggatgcatccacactcaatgccttggtaatctctgcaaagctacacaccccaagcccaaaggaaccgctggctcagctgccacatggggaaggggagtcggcaggacttccaggaggaggcaaggtctcttcgtgggtctgggggagaaaaaaaaatgtctaggtaggaattatggcttgtgccaaagatggggcacttggaggggtgggccttgcaggaagggcatttgtaaatcccaagagttggcattgcagcaatggtgagaggtgggaggtccctgaggcccgggagtcagaggacagcaggcaaagagagaaacagagacagcccccaagagggctctgcagagggtcctgcgccgtgtgctgacaaggtaaagagaatgatgccgctgtgtggttgaggggaggaggcaggtgagactgagtctgtgagaccccggtgggccaaaccaggatcaatgaagaaaactaaagggaagaaaccacagctgaaacgaagggagaaacggagaaacttcgcagtacgcctccctccggaagtagtgggttcccatggccggaagtgttctcagtgaagtccacactgtacttaccgagagcttacttcatgcagggaccattcctggacattctaaatttttcacatggccttaggaggtgggtgttattattatcatccctttttacagtgaggaggctgaggtttagagaggctaaacctctcgcccagtactatggagcacttgctgggatttctgttcaagcagggtcactctagagcctgttatctgagccttggtgactcagtgtggtcctggaacagcagcagctggttagaaatgcaggtgctcaggccccagcctggaccttccgaatcagaatccacttttcagcaaggtcctcagtgatttatgtgcacaaatctaggaatcactgctcggggccacctggctgtcctgcaagcacgctgggtacctggtgtaaattagtaaaatgctgcccctcccccagcagaagcagctcccaaggggctcttggcctgatgaggagagcaggggctggctcgcagtcccaccggcccctcagctactatccttcctgcaggctacaacctgtaaaaccatacccagggttcttgcctttgaagcttcttctaaatagatttactagggctttgaaggtggatgttgctatgggaactgggcaaagctggtgagatcacaactctctctaaactgagcatgtgtgggcctcagctacagactcccaggccccaccctggcaggcagaaataaatgtgtgcctctgttgagccaggccccacttgctgaaagcctggccctcagcgttcagtgcctgggcagcacgatctgtcccaactgtgaactgccaggactcagggcagtaggtctttccaacccccaggcctcagtttccctcttctgaaaagtcctccttcttcccaaagtgcagcgggataatgacaagatgtttccaagtgagaagtggacctaggtggagcctatttcccacgctcttctcttatctccacctggcatggagccgactccctgctggtggctgccaacagcctccctgcagaaagcgcctatgctgctgtgtctcaggatggtgctggcagctgcccagaggcaccagagacagtgctgggtcaggggaagagccacagagggtgccagaaggagggaagggcagaaaagaaggctgcctctcctggtggtcccacacagtgccttcccctagccagggccccgatttgccagtggcatggggccccaggaagcagcacacaggctcaggttcacacttgcaccctcctttcccattgcttcccctctcaggtttccagcccaaggtgcagagccgtctggtggggggcagcagcatctgtgaaggcaccgtggaggtgcgccagggggctcagtgggcagccctgtgtgacagctcttcagccaggagctcgctgcggtgggaggaggtgtgccgggagcagcagtgtggcagcgtcaactcctatcgagtgctggacgctggtgacccaacatcccgggggctcttctgtccccatcagaagctgtcccagtgccacgaactttgggagagaaattcctactgcaagaaggtgtttgtcacatgtgagttggccacagcccacagtgggtggaagcagttactactttacctctaggacccggtcagggtgcatgtctctaaagggaagccctggggagctagacagagagtcccagagacccagaaaggatggagacagggaaattggaaggctagggagcaagagtactcagacagcaatgggcatgaacaataataggagacagggcaagcaacaggcagatcactgtcaggcagctgatgagtcatagaacttctccttctaccttctacttttgcaaggtggaagccagaaaatcaaatggtagatagcacatatttgctacatgaatggtaactaaacgggaagtaaaagagagaaagaatggatggatggatggattggatgggtggatgggtggatggatggatggatggatggatgtggatggatggatggatggatgggtgtggatggatgatggatggatggatggatggatggatggatggatcagtgggtgggtggatggatggatggttggatggatggatggatgagtggactgatggatgggtgagtggatggatggatggatggatggacagaagggcggatggacagatggatggatggatcaagaatagaggccccgctggctattggtatgcaatcatatattggtttctgatggtatatgatggcaaggtgatcactaataactggcaaatggtagaaaattaaatagcttataacaagtgtggcaaatgatagctagatgatcaactgttagatgacaaatggtgggtgggtgagtgggtagcagggaatcctagagatagatggagggatagccaaatagatcattgccttccgtgcatgctggtgaatttctcagatgagcaaggatgacggcggaagccaggcagccagcagcttccctcccacagtttttctccccccaggactgggactgacctaactcttcctccttccccaggccaggatccaaaccccgcaggcctggccgcaggcacggtggcaagcatcatcctggccctggtgctcctggtggtgctgctggtcgtgtgcggcccccttgcctacaagaagctagtgaagaaatgtaggtgtcacggccctgagtggctccgttcccacgtgcagagactggaggggctgcactagagtcctccggaggaggggtcatgcctccagagagctgggcacgcaggacacctctgcttcaccacccagccttcccctctcctgcccattagccattttctgccccaagtaacagaaacacaaagtaaacaaaattgcaattgctgatttgtccatctctggagcccagctgagacccactccaggtcagagagaaggtgtggccattcccaaggctgtggcaggcccagagggtgttcagtacagcctctgatggtaggagacacacatcccaggcctagccccaccacttaccactgcccaagatgctgattgggacacttcctctctctgaccctcagtttcttcatctaccaaatgggcaatcgcacaccttgtgaacgcggggggttgttctccttgccttgcagaacttaagaggaaattattcagacaaagaagtgagaggggagagattgggaacagagggcccagcaggacagtgttaggtcctagtgcctgcccaggtctagttctaaacgcctgtggtcttttctcctggggagccgggcacctctacaccatcctcggcctgctccttcggcacaggatggctgcaattcccttcccgagcaagttaggaaactgaggcctacgagagactccagggggcagagcccagcagccctgccctcagctgcacctgccgccaccatctccctcccaggcccagccccatccccacccctgcctgcccccacccatacctgcccccaccactctgatgtgcctttcttgtctcttgcccagtccgccagaagaagcagcgccagtggattggcccaacgggaatgaaccaaaacagtaagtgtccccggaggcaggagcctccctcaggccctggacagaggccatggaggcagagtcgaggctctctgctgaccacagacggagcctgtggctgcttgaagcctctgatctccacggtgcttgtctgacatgtgactgtggccaacagacgtccccacaccagggagggcggaggcttcttgatgggctgatggctgagcggtttctaccgctgaagcctcagagtgtagaaacatctcatggtatcctttctgtccctcgccccatctctagggtccccagcagccctcacctcctccagcagtattccccaacacagtagccagtggatgttaacaggcagcactcacaagaggcctccctgatcaacagatctggaaaaccatgagttaggcacagctaagcatagctatttcaggacttatcagaaccttaatgggcatttttgtattgcccatctccaaagcaaggatccattaagaagggctgtccaagttattttcatcatggaacaacttacagggccagtattaggacattttggtgcagccagcccaacaccatccctggtcttcatcctccctccttccagccacagtcagagacaccctaatggatggagacatggcgctcttcctgcctcccattctgccttcttcccccttcccaagtccacagccaaatccttcaagagggctctgttgaatttgttattaagaaaggctctggaaactttcttaataacatacaggccctcagctcctggagggcagggagcagatctgtcccgtcacctgtgctccagtctcctgcttggtaaatgcttgatgaccgactcacggaaggccccaccctgccagtcagattgctgggttacccaaacctgctctaaaagtctgctgctgatcctgctagcatgaacctcccaggaagaaaggagagggggatgcattgaaggggctgtgggtgcctttgtcctctccccgctaacatcatgggaataggagattaaagttctgggcacctgctggggaaggagacggaggacacagccacaagtctgacactgtctcctaccatctgcccagtgtctttccatcgcaaccacacggcaaccgtccgatcccatgctgagaaccccacagcctcccacgtggataacgaatacagccaacctcccaggaactcccgcctgtcagcttatccaggtaagcaccagcgggtgctcccaggcacgcaggcagggctgcagcaggccgccaaggcaggtcacgtgatgcccttgaaggtcgggtgatggcccaaagacagaatggagaccccagggtgcaaggggatcaaacatcgcaggatgcagcaggggtacggaagggatatagcctttgcaggccccagctgtcccgtttgagaccacaaactactcatctggagagaagaatgcactcagaaagccatcaaccccagccttgctgtgacctaatgggcctgtttcccttcagggccttgaggggcctggatggtaaatgaggccccttggattcctccgggctagaagagagccattaagtgggctgcaggagcgctgtactaaaggctcccagactggcactaccaattaagccccagggagcctggagttcagcatcattagtgaacgtttggctgatttgatcaaaacagataaggggttgtcaccggctcataaagcccctgtgatcttccaacccactgtgggcagcggctctaggatccaaggggctctgtggagtcaaaaaccctctgcaaacagcgtcctttctttccccagctctggaaggggctctgcatcgctcctccatgcagcctgacaactcctccgacagtgactatgatctgcatggggctcagaggctgtaaaggtgagcccgtctccagcctgaccccagcaccccagggtcccccacagtcctgggggtgagcagcagccactcaatgcctcccctcagtcccaccctgcccatacatgaataggggacccccagcatcttgattcttgtaaagggaaagacaaacgtcagctgtttaggttatacgagctgatttgacaattagagcagagcaatcatgaactttaacaatcaactcttaaactccattcggaaggccacacaggcagagtccctaagagctccgtgatggagtcacacccctctagagctgccaacctgccagcgggcagaaggagcccctggctcaggacagcagccgtccccaagatggagcccagagcatgggtcctgtccccgacctccctgcatcacctctgcggtgtcttcctctaacacgtttccttctcaccccacagaactgggatccatgagcaaaaagccgagagccagacctgtttgtcctgagaaaactgtccgctcttcacttgaaatcatgtccctatttctaccccggccagaacatggacagaggccagaagccttccggacaggcgctgctgccccgagtggcaggccagctcacactctgctgcacaacagctcggccgcccctccacttgtggaagctgtggtgggcagagccccaaaacaagcagccttccaactagagactcgggggtgtctgaagggggccccctttccctgcccgctggggagcggcgtctcagtgaaatcggctttctcctcagactctgtccctggtaaggagtgacaaggaagctcacagctgggcgagtgcattttgaatagttttttgtaagtagtgcttttcctccttcctgacaaatcgagcgctttggcctcttctgtgcagcatccacccctgcggatccctctggggaggacaggaaggggactcccggagacctctgcagccgtggtggtcagaggctgctcacctgagcacaaagacagctctgcacattcaccgcagctgccagccaggggtctgggtgggcaccaccctgacccacagcgtcaccccactccctctgtcttatgactcccctccccaaccccctcatctaaagacaccttcctttccactggctgtcaagcccacagggcaccagtgccacccagggcccggcacaaaggggcgcctagtaaaccttaaccaacttggttttttgcttcacccagcaattaaaagtcccaagctgaggtagtttcagtccatcacagttcatcttctaacccaagagtcagagatggggctggtcatgttcctttggtttgaataactcccttgacgaaaacagactcctctagtacttggagatcttggacgtacacctaatcccatggggcctcggcttccttaactgcaagtgagaagaggaggtctacccaggagcctcgggtctgatcaagggagaggccaggcgcagctcactgcggcggctccctaagaaggtgaagcaacatgggaacacatcctaagacaggtcctttctccacgccatttgatgctgtatctcctgggagcacaggcatcaatggtccaagccgcataataagtctggaagagcaaaagggagttactaggatatggggtgggctgctcccagaatctgctcagctttctgcccccaccaacaccctccaaccaggccttgccttctgagagcccccgtggccaagcccaggtcacagatcttcccccgaccatgctgggaatccagaaacagggaccccatttgtcttcccatatctggtggaggtgagggggctcctcaaaagggaactgagaggctgctcttagggagggcaaaggttcgggggcagccagtgtctcccatcagtgccttttttaataaaagctctttcatctatagtttggccaccatacagtggcctcaaagcaaccatggcctacttaaaaaccaaaccaaaaataaagagtttagttgaggagaaa

SEQ ID NO: 35 - DNA, 426 bp, Homo sapiens
atgcccatggggtctctgcaaccgctggccaccttgtacctgctggggatgctgggtcagtgggggatcgatgaggcagccacgagggccacggatgcccccgtgaggacttgggctttttctcccatgcactggacagccacacaggagcagagagctaccactatcaccgtgaccagcatcatcatcaccatcatgtacctttcaaggcctgactttcatggtgtccagagggaccctaatactcctctccgggggacagatacgtcgcttcctgcctcggacggctcagctggtatgacccaggtaaggaagagccacatggagaaaggcctggggcagggggagagtggggctgtggtttcatcaggccatcggggacctctcgatgaagccatcacttctgccagagtgaaccccacccta

SEQ ID NO: 36 - protein, 142 aa, Homo sapiens
MPMGSLQPLATLYLLGMLGQWGIDEAATRATDAPVRTWAFSPMHWTATQEQRATTITVTSIIITIMYLSRPDFHGVQRDPNTPLRGTDTSLPASDGSAGMTQVRKSHMEKGLGQGESGAVVSSGHRGPLDEAITSARVNPTL

SEQ ID NO: 37 - DNA, 3127 bp, Homo sapiens
gagatacccggccagacaccctcacctgcggtgcccagctgcccaggctgaggcaagagaaggccagaaaccatgcccatggggtctctgcaaccgctggccaccttgtacctgctggggatgctggtcgcttcctgcctcggacggctcagctggtatgacccagatttccaggcaaggctcacccgttccaactcgaagtgccagggccagctggaggtctacctcaaggacggatggcacatggtttgcagccagagctggggccggagctccaagcagtgggaggaccccagtcaagcgtcaaaagtctgccagcggctgaactgtggggtgcccttaagccttggccccttccttgtcacctacacacctcagagctcaatcatctgctacggacaactgggctccttctccaactgcagccacagcagaaatgacatgtgtcactctctgggcctgacctgcttagaaccccagaagacaacacctccaacgacaaggcccccgcccaccacaactccagagcccacagctcctcccaggctgcagctggtggcacagtctggcggccagcactgtgccggcgtggtggagttctacagcggcagcctggggggtaccatcagctatgaggcccaggacaagacccaggacctggagaacttcctctgcaacaacctccagtgtggctccttcttgaagcatctgccagagactgaggcaggcagagcccaagacccaggggagccacgggaacaccagcccttgccaatccaatggaagatccagaactcaagctgtacctccctggagcattgcttcaggaaaatcaagccccagaaaagtggccgagttcttgccctcctttgctcaggtttccagcccaaggtgcagagccgtctggtggggggcagcagcatctgtgaaggcaccgtggaggtgcgccagggggctcagtgggcagccctgtgtgacagctcttcagccaggagctcgctgcggtgggaggaggtgtgccgggagcagcagtgtggcagcgtcaactcctatcgagtgctggacgctggtgacccaacatcccgggggctcttctgtccccatcagaagctgtcccagtgccacgaactttgggagagaaattcctactgcaagaaggtgtttgtcacatgccaggatccaaaccccgcaggcctggccgcaggcacggtggcaagcatcatcctggccctggtgctcctggtggtgctgctggtcgtgtgcggcccccttgcctacaagaagctagtgaagaaattccgccagaagaagcagcgccagtggattggcccaacgggaatgaaccaaaacatgtctttccatcgcaaccacacggcaaccgtccgatcccatgctgagaaccccacagcctcccacgtggataacgaatacagccaacctcccaggaactcccgcctgtcagcttatccagctctggaaggggctctgcatcgctcctccatgcagcctgacaactcctccgacagtgactatgatctgcatggggctcagaggctgtaaagaactgggatccatgagcaaaaagccgagagccagacctgtttgtcctgagaaaactgtccgctcttcacttgaaatcatgtccctatttctaccccggccagaacatggacagaggccagaagccttccggacaggcgctgctgccccgagtggcaggccagctcacactctgctgcacaacagctcggccgcccctccacttgtggaagctgtggtgggcagagccccaaaacaagcagccttccaactagagactcgggggtgtctgaagggggccccctttccctgcccgctggggagcggcgtctcagtgaaatcggctttctcctcagactctgtccctggtaaggagtgacaaggaagctcacagctgggcgagtgcattttgaatagttttttgtaagtagtgcttttcctccttcctgacaaatcgagcgctttggcctcttctgtgcagcatccacccctgcggatccctctggggaggacaggaaggggactcccggagacctctgcagccgtggtggtcagaggctgctcacctgagcacaaagacagctctgcacattcaccgcagctgccagccaggggtctgggtgggcaccaccctgacccacagcgtcaccccactccctctgtcttatgactcccctccccaaccccctcatctaaagacaccttcctttccactggctgtcaagcccacagggcaccagtgccacccagggcccggcacaaaggggcgcctagtaaaccttaaccaacttggttttttgcttcacccagcaattaaaagtcccaagctgaggtagtttcagtccatcacagttcatcttctaacccaagagtcagagatggggctggtcatgttcctttggtttgaataactcccttgacgaaaacagactcctctagtacttggagatcttggacgtacacctaatcccatggggcctcggcttccttaactgcaagtgagaagaggaggtctacccaggagcctcgggtctgatcaagggagaggccaggcgcagctcactgcggcggctccctaagaaggtgaagcaacatgggaacacatcctaagacaggtcctttctccacgccatttgatgctgtatctcctgggagcacaggcatcaatggtccaagccgcataataagtctggaagagcaaaagggagttactaggatatggggtgggctgctcccagaatctgctcagctttctgcccccaccaacaccctccaaccaggccttgccttctgagagcccccgtggccaagcccaggtcacagatcttcccccgaccatgctgggaatccagaaacagggaccccatttgtcttcccatatctggtggaggtgagggggctcctcaaaagggaactgagaggctgctcttagggagggcaaaggttcgggggcagccagtgtctcccatcagtgccttttttaataaaagctctttcatctatagtttggccaccatacagtggcctcaaagcaaccatggcctacttaaaaaccaaaccaaaaataaagagtttagttgaggagaaa

SEQ ID NO: 38 - protein, 493 aa, Homo sapiens
MPMGSLQPLATLYLLGMLVASCLGRLSWYDPDFQARLTRSNSKCQGQLEVYLKDGWHMVCSQSWGRSSKQWEDPSQASKVCQRLNCGVPLSLGPFLVTYTPQSSIICYGQLGSFSNCSHSRNDMCHSLGLTCLEPQKTTPPTWPPTTTPEPTAPPRLQLVAQSGGQHCAGVVEFYSGSLGGTISYEAQDKTQDLENFLCNNLQCGSFLKHLPETEAGRAQDPGEPREHQPLPIQWKIQNSSCTSLEHCFRKIKPQKSGRVLALLCSGFQPKVQSRLVGGSSICEGTVEVRQGAQWAALCDSSSARSSLRWEEVCREQQCGSVNSYRVLDAGDPTSRGLFCPHQKLSQCHELWERNSYCKKVFVTCQDPNPAGLAAGTVASIILALVLLVVLLVVCGPLAYKKLVKKFRQKKQRQWIGPTGMNQNMSFHRNHTATVRSHAENPTASHVDNEYSQPPRNSRLSAYPALEGALHRSSMQPDNSSDSDYDLHGAQRL

SEQ ID NO: 39 - DNA, 32073 bp, Mus musculus
  misc_feature (1)...(32073): n = A,T,C or G
tccttccccctcctcctcgtctcctccctccccgcccccacctccttcttcctctccgaagggctggtaacttgttgtgcggagcgaacggcgacaacgacggcgcgacggaggcaccatccgggcgggcagcatgggcacgtccgcgcgctgggcgctgtggctgctgctcgcgctgtgctgggcgccccgggacagcggcgccactgcaagcggtgagtggggacgcgcccctccgcactcggcccgaaacaagccgaggcgtccgcgatcgccgcgttctgggggaccccggggctcctcttgcccatcccctcctagcaggcgcctctccacgctcctctcctgcctcccctccccacccgggtggcgcctctgagctgtcagagccgaggttactgggagccaggcccgggggacggtggggtttagggtgtcctaaagcgtcccttgaacttgttgtcattcttctgtgtcccccttcttcccagaacctctgttttacatggttttcaccccccattgacaagggctaggggatgtgggctttggagccactgaacaatggttctgcctcctctgccaggcgggctgttaggaccgtggcagagcacggggcctggaagcccgagtgcgcccctcagacttaagcagggttgagagcgcacagtgggtgaaggtgggcgtctccgaggacaccgggcgccaggtgccggccgagccgggagtcctcgcgctgccgtgagcaagcgcacgttcggtgggcggcagcctggaggccgagccatgacaagtacgcagcctgcgcccgggactgagactccccaggcgccgggccgtctctcgggctccaagagtggctttcaactggactgtcctccgagtgcttttctttctcccatccccggggattccgcagctactgcggcttttaaaaacctctggggtctctgagataactgaacgggggaggggagtgggatcaagacttaatcaggttactttgccgagcctcattctgggcaacactttcccccagagaaactgagtcccagtgtagtgactgtaattagcctttattctgcacaatacggcccgaaggtgtggagctggagcgtgtgactggagcttggggagggcggggtgactactgtcgagtcccagggggtcggcacactggctttggagccctgtgtgtttccagcaccccatcttgggtcacacaactttccagagcaggtgataagatgccttcctaacaaggtccgcgtctgatccttggcgggccactgaagaggtcttagaggtcttaagaggtgacaccaaagtgcttgcttgccaaccagctctaggtaattagggcagaacgctgtcccagctctaaatagtccacaatccacatctcctgtcgccgggtagcttagaaggcccgcctgcgtgcggtcacgtgtgtcctggagtgagagcgaactttcaagtgtgtggtcaagctgtctgtcgagctatgctggggtgtttaagtctcccagcgcccctgggcctttggttccgctgtccggagcgtgagaagctgggcagggcttttctgccccatgcgattggctggtagctggattgcgtttagcttggtcacgtgtctacgcggagttaattgagctgccccagctgggttacctttaagatcagccaggctcagaggggcctttccctctggcgctttctccagctgcactctgaaaagggcccaggtatcgtgacgctagaatccttcctgtgacaaacctctgtgcccagagaagccctgcttaacagaacatttcagacgctgacattaatcattaatggatgagtaatgttaacttattaaaccatctctcagaagagtgacttgactcgggctatatattttgtagtatttcaaaacacgaatgcataaaatccattactgactgtgatccggggagttgggagaaaggagtctccttagctgcagaaccttttggattcttggaatgtttaaagtgctaactttccatcaggtgctgttttttacggagtggtcggaaagcatccagactgcttcaaggagctagtccaacaccagaagttgttgagctgggatcaggaaagtggggatagcctttgtttctcctttactgcaagtgggctatggtggtgctgtaaaaagtggaagagagaaccaggcacaaacctaagcagccagagtgggagaggcagttctttctgaactacagcagacttggagttggttgaccataagtgaacccacagtagtgtcctaagttcaaagtcccaaaacatgcagactgatttttctgccccagaccttctgtgattactctttctctccaacccttccctctgccccccaccaacacacacacacacacacacacacacacacacacactaaactgcctgacacaggggaggcatgtgtgtatagagtttctgcaaggaattgaagtgaagggacactaacaaacgagagatcgcaaggactgatggcagaacacatgggggttctaggactcttgcctcatatagattaagcctaggtatagattaagatacggtgtgttgtacagtcttcaaagccagagttctgcaagagctcttccaatctgaccagtgactctcacttctcttcccctgggactgagaaataccagagtatctgcaggtaggaatctgaaagaccaggagagataattcctggcttaccagagcatcaagaaaaggcagagaccgtagcaatccatgcagatgaaggctttctttttaaaaagagagtcacaacccaagcttcatgggcagcgcatttcccaaagcccgaagcagctttttgcccaggttcattctcttaccagtacctctagtgctgtgtcatctctacacaattctgcttttaatgcttgagtctctagagacctacactgtgtatataaagttcaagttcagtagagccaacataggttaagacttcaggctgaccaactgcacttgtaaacctgtgtaaaggtggctccctccatcttctaaacagtggcaaacctgatcatcagattcctgcttcctaaaatatgagtaacctcagacaggacttcccggtagaacttcttgtgaaggttctagaagagctaaagagctgttgtgacccctttctgttccctggacagtgtcagaaccataaaacgtgtgccttaagatgaagagcacagacagggccccaggcatatggcttcaggtttagatccccaaaccctgacagttaccaaatggcatagaaagagaaaatgtatagtaactattttctagtctctcacagagtgtcaagtggttctcagtggaggtaagatggagatggagctgttctcatttcaggtcctggtcttgattggcttaacttgaccttgttttggaaagccactggcaggtgccagcctatgagacattaaggacatcacagagcccaaacaggcctgaagtggtgcttgtcacataaagatctggcttacaacagagagtctcactgactaagacagctgtcctccgaaaggcaggtgatagagtcatctaacttgagataatctcaagagatgatcacccaggacgatcccccagaccacagcacgcagatggctttcaagaaaaatagaagctcttctttggaggttatgactgaaatgtacttattaaaaaggaagaatgcaagactctatccccttctagctgaggaggggataatctgaggactggtagctttttctgaggtctccaaggcatactctaacccagttcttggagaacctacttgtaagtaaaactggctcaattttactctatttgtttttaatataaatctgtatttttctgcttagctccagggttggtttgcaatcatggccctaaacacggttaattccagctagttagatatgctaactgtggtgtagctacatgagaaagcaccttaaactggacctgctttgccttcaggtggagaaagaaccctggatgatttgggcctgttagtcatttttatgctctaaattagatcagtgtttgtgaaggggccttgcactaactttttctggtatacatgctcagctttgtgtggtagaaatgctcgactttgtacggtagagatgcactgtgtggaggagagagggtgtgcctgagccagcacttaagaagtacatttagggcaagaagctacaacttggaagggtcaggcactcactagaatggccaattctgccaccaccaacttggggcatctgggttggcaattggccagtagtctttaggtgtttaaaaaagtcttgccatggaggtgagggagtgggggggggatgcagtttgccaggaagtgatgattgacatttgagtgttcatatgttataaccacatttcctgcaaagaatttagtgtatactgtcctattctctatacctgcctctaatcttgaattgtcctaagaatgctttctcaagatataaattattaactggccaggaggtttaccaggcaggatataaaatcccttctggctttagcatattaaagtctaagttgctagtgaacttgaagtcagtctcctttgtatatctgctcaagaccacgtggtaacaggtcagcatagaagccagaaagctgcccacttggtgccatgtttttgtaggaagtcaaaccaggaaagtcaagatgcaaaaggaggtgatcgtagaagctgtgaggggaatgagcagacctggtgcttcgtaatcacaaaagccactgacatcagctgaagatgtcccgtgagctcccaagtgctgctttgatcatcgctcataatgtttccctaaaatcaccagcaacttagactttaatacgccaaagccagaagggattttatctctgccaaatggtcttacgaaggtaaggattcaaacaaccatagtggctatggccagcatccccaaagagcagtagtatgtcaaaagtaagacctgggtctgacacaccaacctcctaacttgctcagatctttcatgtgttttagaatctctctcctgtgggagtgtggctgacacactcactgtggcagacaggtgtgcaacatgccttgctttttaataactcgccacacagatgggttaaaagtactctcgtgggctcagaaagcaggcacctttataactttacctttcaaagattctaccaggcaaaacttcatttagcaggtcacacttcacttgaagtttagacaagctgagaaaatattttgacaaaagtctataagtcagaacagctttacaggttaattcattaaccaactaatacaatcatggctgttgactaggacatagcaaatctttggattctgggtgataaatcctcagtgcactggctctgggaaaggtatgaaaacttttgggaagtaagccagatcttccttgtttcttgggaaagaatttaaagacccagaggggcacagagggcctccatggagaagtgcaatctgaacctgcccccttgggggaagaggatggaatcagatggacaaatgtaaccaaaacatcagtgagagtggtcgaaggcaggggacataagggaagccccttagagcccatagctccttagctctgctgttgtagccagaacagatggcgggtgatcactgagaggaagaagtcagggcaagctggtagggaactgagactcaattctagaggcagttggaagccaggaaatgatcctatcctcggcccttctggatattctaagtggcttaaatcactctcttaatttggatagagacagcaacagcccggaggcaaagggaagggtgacttaaatttagaccgagtgagaaatgaagggttacccttggccaagatttgatggcccaatggcaggggagaaggatcccggctccctctgggctactgagttagaataagaggcaagccaactgaggataaaactcaaagagaagaaggtgggttttagatcaaactgctttatgttgcatgtctggcaagccatctagatgaatgtttcctatatcatgtgctcaaaagctgtatttgggatgtcatctacatgtctgttctaaaacactttcatttctctcctttctgagcccagtgacagacatgagggcttatgggggattaacagtgtatttagtattcaatttcaattacaaccttgtaaacaaagtctcttccatgttatatgttgcctctgtaacttcttggtcttcatgctgatgccccttgggctactctccatctccaggcagataaggtacaaagcctttacaatgacttggtcaatgtaccctcatcaagaaaatcaagagacttagtccttctaggaaaagctgctaggggaaatctagcaacatatttaaaaggctacgatggaaagaagaaaaacgggccctatctcaactataaagctatgctgtggagtgtcgttcttgagaaggaaaactacttcattcttgatggatttaagcagactgtattaggcaaattctaagcaaatggaatattctagaattatgcagtcctgtatgggttactgttgggttttttgtgcttggtaggtagaatgggatttagagccagagtacctgagttcagatctttggtaagcccagggtaatcttgggcaagtcaccatatttttcttttccaaaactgtggagaggaaaaggggaagggtcatatagaaccagtgattaaagacatgagaagtctttagagcagcaactggccaacaatgaaaagcatttatttgctgtatttaggattctaagataatccctatccagtataaatggaacaactgtgacaactgaactgtaaaattcattagtctgcatctcagagcctcttcctgggcaccttgctatagactttgctgctgacagcctctcattcctgtaggaaaactttttctttttttgctgactcagaagtctgcttgtcctaaaaggagttttagcctatgaataggattggcattaaactagcaagcagtagagacaaagtagactaaaaataaatgcccttggtggccctagatgtgccaaagggaatggactgaagaaaaaccagtagatgatagcacccttaccatgtctgccagtgaagtgaatgctgggcctggcagagtgtggcaaccctctacccctcacagattcaagttcttctgagcctaatactctgatgtctggaatactcaatattccagacattcaagcaagggactcctgccaacattactcaaagcctacagggaaatctgtggcccatcctgaaagccagctaggctattcactgtaaggcctatgcactacttcactgaagctcacacgctgattttccatgttaacccttgcagaaccaattagacaatggcgagctgacttctctgtgcactcaaacccttacaccgccccccacccccgccccaagacccataaacggcaggtcgcagagtgaatgtgaagtgcgtaggtgagcaaacctcctggaacatagatattttctgaagcctggtgccacctattcaagtgacaacagaagcatttgggggagtgtagctattactaactctaatagccacatgagtggatagacacaagccaatccaaatctctgggctcaaaaggacaaaggtattcccactcaatattagaggtagaggaaacttagaaagtttgatctcttcacagaagaggagccttttcatattcctaaacgaataccaagagtctttctcatttgcagtggaggcagagctccaggctccatgcctctcccctctagcctgcccccacccccattcctttagcctcaagctacttcctaggaacactgaagctttaaggaatccactgaaaactgtattttacctccagcttcccacctttcagaacagacagatgcaggggtatagagtccctagcatttccactcccaaggttctttatggtgtacagtggctttagatcagcttaacaattaaaagaaacctggtgatggatgatttcatgccaattgttccctctatgtactgtaagagtgaacttgagatttaacgtccatggatgaaaatagactacaggtctacaatcctataatccccaaagctttgagaaccaaaagcttcttaactcatgtggcgcttttggttctggacctctgagcagcagtggtctcagtggaacatccgaatggaaaggtagaatctttttgggacctgcagagaaaatcctgtagtattccagggtggtggctggggtctctgtgttcaatttagtggctgagctctccctgctgtgcatggaacacagaagtgaacagaagcagggaacacttcctacctagcagcagcctcttaaagtgctcagggaactggaaatctgagctgcaccaacgctgttgattctctttagaggacctttatcaagccagctggcttttcgtccatccttttctccatcatcttttagataagcagagttgtttcagtaaccattgtcttcctcatgtacatttttcctctttgataatggaatgtcacgtgtgtcatagtaacatacaactttccgataagcaagcagaagccttggtgacatggacacatgttagcaaagaaaagctagacattagatccctttctgctttaggatattggaatgaacagatgaaagtgctatgtctgttataaccctgttttgagccaaacctccagggattttaacataacctattactgttgatagcttgtgtattacaactggatccagagtccagaacgaccaggaacagtatattagctttatcaggttatatgttgggcttttagctccaagacagcttgagggtctacaaaatccatcacatgagcctcattttttgaggatgtcctctcccacaagcctaatcctggggctaaaaatattttttccaagtctctctggaagtctgatggcatggttatcatttctccctgagtctctctggaagtctgatggcgtggttatcatcctcactatatagatttcaatgttaatggtttgggctcattttgacttttgctcttcaaaagtaaagccttagaagtcactctttttgcctttcctgtatcctaactgcagggagctatcctttccacatttgtttgtttcattctatgttctctgagtgtagatcctttttcctaatgaagtcctctgagtggattcctgccattcctgtagtcctcaaagctgaaaggttatagagctgtagcaaatggcctcaggaacatagacctccagctctgagaacttggagaacattccaaggactcatggtggcaggaggagagagggtggggcgagagagagggaggaggcagccaggtgcctcacacttggcttctccgttttaaaacaaacaactgatgctcacctcttgttccctttgtaactccctagtattttttttatttgctaaaatatttgtagaacgaataaacattatgaaatggtggtagaaaatatcatcaagttatattgcttggtagccaagttctagctagctaaacgtttaagagcagaaagctccatatagatttaaaaagccattctggaaggtagtcacaccttggtgttaatcttgtcttgggccgaattttaaactctttgggaattagccacaagtgcagcattcttcctgacagcagggcggagttgacaccagggagaccaactagagcattgtgcggttcacacaagtgttccagtctgtgcttgcctctgccctctctgtttctatgccagcatgccccagctgcaagtgctgagaggtggtaggaaatcggaaggctttctgcttggaaccaccctccccccagcaaatctgcatgcaccctgggaagaaagctgggttctgcaagtccaggcagtgtattgaagagaggcctttaagggacaagagctacatcttttattgcaatctgcaatctggtcttgtagaaggatagaagtgctaatgactaaagcacctgaacagtcactgtcctggccatggagtaccgccatgaaaatcttagttcacacctctctaaaggacatgtccataatgagccaaagccactgagcccaggcaagcagagtcagctctatggcttgctctccttttctttcgtggcaccccgttgtctcctaaccatgctttcttgatgcttttgatttgttttggagctggtttgtaaatgtatgttttccaaaggaggcctcagtttttaagatacatgaccattatctatctgtggtttctgcttgccaccctcacaagtagtttactcttacctggtgatagcagagtcactcttgagtaaagtggtgcctgtagccaggaaatgctatgaaaggattaggatggtctgcatgttgttgcccgccccctcccccccccacacacagacaatttatgcaaagaagagtcttgaggccattcgatggccccttgtgtctctgacctagctaagttcattaatcctggtctgactccattggctaaagatcactattccagccaccatgtccatttttttagaaataaaagggatttttaattacatttatttactcatgtatgtatttatgtgtatatatgtgtacacatgtgccatagcatagatgagaggtcaaagggcaatttacaggaagcagttctctccaaccctgtatgaataaaacttaatgtctcaatcttgggagcaagtgccacttcctgctgagccatctcacctctagatcatggaagcaaaaactaaagggaaggaaaatgaactccctgttcttttagagagacagccatgcatcacataatgatagagataagtcctccactctacagttcattgtgcaattcattgttcctttacttaaacacatagcagtggttgtcttggttactatcctattgctgtgatgagacaccatgagcaaggcaacttataagagaaagtacttcactgagtactgcttacataggcttagtctatgaccgtcatcatggggagcatagaaacaggtaggcaggcatgacactagaataaaagctgagaactgagagagacagaaacagagaaacagagaaacagagagagcacttagtgtggacttttaaaacttcctaatcatccccacagttccaccaactgggaaccaaacattaaaatgtattagcctatgggaggccattctcactcaaaacacaatggtttgacttcatacctgggttatagggtctagtctattgcttctaggttccctgcatacagcatagtacttgcactaaattttgtagacatccataacgcaacggcaggtatgtgtgtagccagatatattaaaacatggaaaaggcacacacaaatatatctgcacaaggttaacagggtatctctgtgcaggatgcttagcgtgagtggacttggcagagttggcagttgctctgggtgagcctgtgagtgaataaaaagtgagatccaaggcctaagacattgctgtcacttcagaaacactgtatccttagtgggcctttgatttacagtaagtttataaaaatatttctgctttcaataatgaatattcttttttcttttttcaacattaaaaaaaatgtttattcagggtgcacagcaccagtgtgacagttggtagacaaatttcaggagtcattccaccgtaggttcaagagcttgaccccaggtgatcagacttggatagcaagtgcctttacccactgagccatctacctcaccttaaaaatatattaaactctaataacagcttaaaacacatggtgcacaactatgcaaaaaattgtctctacatgctcattctacaagcttttctgtatttatctttttgtgtttcaaacgtttcctaagagcaaagccacggtcatacaccttctcctgagcctattgagtgccgggcctgttagtatcgccccctgtgtgcttgaaactatcctctacaacagtaaggccttctggactctctcctgaaggaggtgacgggaactctcgcttatgcccatggtgctttgtatcttcttttcaatcagaaaaatctctatgaacatacctccctatcagtgaatacatttgtgttgggtgtccatgtttgccgatacatccccaagctacttaaagcccataatcttctcctaacccttgaattttctcagaggtggtttcttttcttctgaagtttccttttgctagttcttcatctgggtgtcctctatacgctcacaagtatgttgctccattgcagttttatggttaccattggagatggtgacatattagccaaaatatcaccagccaacatgtgtctggatttcttagaagctacgtaattcctgtctgcttgcatgccaccagttagaacctgctatctcagctgtggctctctgggggaaaggctagaactccgatgttcagttttagtttgttgcccagtgaaggagtctgcaactgttttccactgtccccaaactcatcccagtctggccccctagaaagacacagcttgctgagtctgcagctgttcctatccatcggtcttggggaacttgtatctctaaattaccatctatgcatgcattgatcaatgtcccttcttcctcctagggaagaaagccaaatgtgatagctcccagtttcagtgcacaaatggccgctgcattaccctgctgtggaaatgtgatggagatgaagactgtgcggatggcagcgacgagaagaactgtggtaagtctttggcagtcttgttcgtcaccaagctttaggtctagtttggacttatgcatctgacttaatgtgcacatgttcttctagcctctgcaaatatattgagattctgtaagtaaaactcactggagtatgaccgtgaatcagagtccaatgaatctagactggtctagaggaatagaattgaatacttgacatgaggaaatcaccttgaatatagaatgttgactaccaagagggatttctttcaaatgacgagatctgatttatcatacctcagaaaaatgtgctgctggaaactgagaaaggaaagagaggaccagacatagaagcaggcagaagactgcataaagtaactttataaatacgcaaatgggggaatttgatggagggatgacttagtggttaagactgtctacagctttttcagaaggcctgagttcatttcctaccacccagattggacagctcataatctccctgctttaggggatctgacacccttatttgacatccatgggcatcccctgtgtatccacgtgaggacacacatatggtatacaattatgcagaaatgcacacgtatgcatataaacaaaataaatacatctttaaattcacaaatggctctgatccaagaatgtagaaagctctggacattacaacatcccctaacattccagaggttaattaactgctataaaaatgacaagacaacaacaggcatcaaagatcagaaaaagattctacttgtttgtttgtttgtttacaatacttgcttctacaaaaccatgaggcagagtagaaactattccccttcacaaacgaatgtgactataacagcataccattgatcagaacctaccaaaaaggtcatggtgagaaaggcctgtgtgcattggccccataacctcatgccataaagaataactgagaactgtatgtcagcatcacatggacctggatattttgttgaagtttacttatttactctgttctgtgatggaaaaaaaaatcccagcacagtgttgcaagggaagtgtgaccattgtcgtttgccttttgagagatggtgcagacaatgctggaggaacatgtgtatcccagcacgtggggatcagaagaaaaataaaggccatgtggggttttattgactgtcttgttggttattccttcagtgcttctttatttatcagcattaaattgtcacggacattatccactctcaaattgaccatagtagttgtcaggtgccaaaatgagccctctccaaaattgcagccatgtacctaccggtcaaaggttacatggggaagttggaaggcggcttcagaagttttaagtaagtgtgtagtttttgcatttcagacacacattcttatcccttccctgtttacctcccaggagccagcaacaaagctgcagacagatgtgtttaatttatcccacctcaagagatcttgaaatgtcaaggcagcaagaccccgggtgcttctgtgccagtgccagctctgaaagtccattctacagctggggaaacttgtccccagtctcaagaccaaggctagttctcctgtgctatccttctccattgtgggcttttaatgtaaagatttcactctgcaccgcagaacaccgagtttcctgctacttctaggttgtttaaagtctatagttctctcaactcatctctcactaaggggactttcagctgttttatggttgtaaggtgtgaagctaccaaaaagtcatgtattgagcaaaggacatcttacacctatttttatgcttcccattataggaggttttatcatctagctcaccagagacacccgggtcatcataggaacagtgactggacttttttttaagtcctttctgcatgagtactctcaaccagccacatggtagaggatttgggtggtggaaattggtaaatgaacagcgaatcaagatctcttgcggtggcataaattaaatatatcaataggtagatttgttgttgctggctcccaggagggaaacaggaaaggggtaagcattatcaaaagcagcctgaaatgtgtgtctggaatggaaaaactacacccttacttaaaacttctgaagcctccttccaacttccccatgtaacctttgacgcgactgtagttgcgggttttcgcgaggatcctttttgcacttgacagctactacgatcagtttgagtgtggatttcttatgccacttgcttctgcgacttcccagagtatgtatccaatggctttcctcccctgtggaacgctttctatctgcatgtcagtattaatttgaaggcttttctttgcccctacagtgtatgctcagaattgcgaaagatgatctctatgaagatgtgtccatatttatctttgctctaactctttgttgcacagttgatctttcatatcatgacattttctacttgcaaaatcatctgctttctttatggccagttaccctgttttcacttttgcaactaacagagctgaccacaggttgaattgtagcatcaagccccatagcctggccttggtttccatatgggcccaggagaacacaggccttgtatagtatttgctgtgttaacgttgtattatgattttaaaaatgggtcaatttatgagttggcatggctttgcatggttccttagctacgttcaaggatatgaataagcccttaggattcatcataatttaccagcccatgctgagtgttataaagtgactgtcttccaagtgtataggcttaacaagaaaggcataagaacaagccatagccttcaaggcctctacccagcttaaaccacttgtgcccagtgatctcttagaaatttgcaaagtattgtaggctttgactgatttacaaacacaaaaaaaaaaatgatgagaggggtttttaaaatggacttttgagtagaaattatagacacatagggatggaggaatctagtctaaaaagacaaccacagtatgttggtatctcatctagctactttggcaaaactcttccagattgtgggactccttcgtgggtacggtgatcaaactgcctgctttgtttatatttattttcctagtctaattaattggtggcaagttgtagcgtaactctaagtctctagtagtagaattgatattttgccttaggctatttgatgggagctgtgaattatgggacttagtcctggcagctccagtgacttttagttggttgatgttaaaccaaactttggctgaaagcctaaaatctctttgaattccaagtcctaccacttgttacaagtgttataattggcttaagcttgtctggtgtgtgagttcctctacctcagtagaccagcaagcgtggcaatatccagttctagagcatacctctgcattgtgacaattgtcactgaagcagccttggttttcactgctgggacacaaatactataggtaaagaggcttaaatgatagaaatttgattttaggattctgggtgttaggaagacccaaaacaaagagacaaatagagtgtctgataaaagccctcttttctgaaatgcagaaggctgttttctttccatgtcctcccatggtaggagagaaaggagaaggagagatgggagggtggcaaacaagcactcatgtttctaataagggcacctatcccagtggagaaggttccagcctcgcctccctcaggtcctccctcctacaacagagctgtagggatttcaagatgtgaagattatgaagacacacatacttcataacaaacagttatcctaggatccagtaggaaatcttttctatggtttgtctcttctggagttcacgttgaagtctgatttttgatagtattgtgttgagagatggtagggtacttaggaagtgattaggtcagcgagagagaataaatcctttttccctgaccctgattaatcactaagagagtcgcctaggaagcaagccacactccaaagcaagcaggtgttggtggaatgctctcaggattcccagctcagaaccttgagttgaaataagtttctttcctttataaattgtccactctcaaatgttctgttatagggacagaaaatggtcttggaggaaaaacacctcagagtgtgtgaatgcgttggaagaaatccatggtgctaacattgtacacagatgagatcattttaagatgacccctgggtcataagacaatggacaacctttgtctttccttgactttctcatcctctgagtctctctaatgaataactccctcctctgaaacctatgaagaaaagatgagctccctagagctcagccctagagatgccaacaatttgaatatcagtcagctgattcagcattgtttttaaagggaaacatacttaaatatggtttttaccttaatcagaaaactgaggtctggggcaaatgatattaattctaactctgagaataaacgtttatagtaaagaagacgtgtgctgagtctgacttcgtgtgcaaaaacggccagtgtgttcctaacagatggcagtgtgacggggatcctgattgcgaagacggttctgatgaaagccctgaacagtgccgtgagtgtgccttgacttgctttggactagacctcctttgtgctgttctgtctccgttctaagtgatgctttatcgattgcttggcattcatttttctttgcctgcctgaaacttgaggccaactgacttgaaggtcattccagctattaacagttactccctctcctttaaagactgctctccctagtctaacaagactgacattctcttgggtagcttcctcattgaatacttaagactgaagccagcagattcaattaagaactccttgactaggtgcatagatctcaaatgtctgacaggaactggatagatggtttccctgatcctggaagtaaaatcgagatgtgaaggtttcctaagagacacacataagctttgaaacgaccagattttttatactacgaaaatatgctattattaaaacaggaagatgattagtaataggataatttggttttttttaaacaaatgtgtaaccaaaagcaggggccatagagtctgttactgagtaagaaaaacttcatgaaggtacaaataatttctcttctcataggctgatattcaagagcaagtttcaaagcctcagagaaaggtgtgttggaatcacactgggatcatttggaggctaagatgagggcaagtctgatgattcactgcagtagaggcctgctcacacagaataaataggattgacataatccaagtttaggtttagggtatgattatgaaaatacctaaggttggactttcattgtctagcaaagaagtgaactgttttgtcaatgagttagggtcctagacagaatcttcagccccatgtttcagtggtgaatgacatggtaaaaatcaatagtcaaggcatatccctgctttatggatacaatgaaagatgtgaaaaggggacttaggaaggaaactgttccatagtaggtgtcctagaggtaacgcatctgacctttaatggaatcaggattaggtgacaatatctggtatgcccactgatatccaaacataagtaagggactaggagtaggctaacaaatcaacttaaccgtgccaagtaaaacaaaagccagaactaagcgtgcggcagaaccttgaaagagtaacccagtcaaggttctcaggtacgctgccaggtggccttgcttggcgtagcttctaaggacggagctggcgaaggatctgcctggcttccactacccagtgtgcctgtgtacctgaccactgagccccaggtgttgcacttccaggcagcacgggagcagcaactttgcactgaccagtttggaggctcttttgagactgtatgtcatcaacagatatgagaacatgccgcataaatgaaatcagctgtggcgcccgttctactcagtgtatccccgtgtcctggagatgcgatggtgaaaatgattgtgacaatggagaagatgaagaaaactgtggtaagaagaccagtgtgcagtggcatatcccagagacccttttcctaaagaaaggcaggcaagggatgctaacttaagcctgaagacccagtgccgctgacccactttgcagtggctttgctgtctgctcaatatttgtccttcctaaccaccataaaactgtgaaaggccttttcctgctgattggccattgcctggtatgtcttccaggcagatagaagcaatcagagaagtcatcttggtgcttacattcagcatagttcagcatagtacatttagcacagcctagtaaggttgcagcgatgtgggcttttgtcttttatgacagtaactcatgggcctttcttacagtggctcaataaaactagaaagtgatgggaccaacagacacattcctaggtttagttagattagcttcttggaataaggtacatgagtatgagacaaacatttccaccaactggaatctatggctaagttagctgagaaacatgacctatcatgttgccagcaaatacaaagcctacctgacctttgtgttctattacgatgcctatctctgaatgctagtgctgtttcctattctttcatgcttatattcttggaaagtctagaatcaagtgttccatgttaaaggcgaggccctggagaaaatctgcgggttaaataaacatgaccctgacttctttcaaactactacccctttaagaccccccccctataacctgagtttgatgagtttaatgaggacaggctgcagtagtatccaagggagctcagggtccttgcaggtcaaacactagtctggcaggttcaagtcattttgtgattgtaataccactgcacctagtccaaggagtttcacgttcagtcacagacctgagcttcatactttgccatggtgagccctggagctgccatacattttccctcgaaaatctacactttgcttcccaagagagttgtggtctcctgtccaattaccaccaaattataaccttggtatgtttggcaggaatttaaatcaaaatctaaactggctactgtgaataccttgtcatcaatagcatgcggggttgctaggctatgattctagtcctagcaggaacatttcctaaaaataaaaaataaaaattattaagttggtattcctaatgtttatttaaaagactcaaaaggaaggaaccatgtagagtgttctttggtttgtttctttttggagagtgccttattttccattataccttgcccatatagctgatgtatattctcagctagtgatatgacttcagctgacatgcaataggttggtctaggtataaacgctgccttccaaaatgaaatacccaaggccagcttaagcttttgaacactgtccctttaagtgtcagttgtgggtctcatctcgaattagtttcgagccttctactgttttcttggtcctttatttctgctcttacacatagtatggctgcatcttattttatactgtgaaactgttttgtcatatttcagaaactcgttctcaatataacagcactgtagctttacaattagaaagctaaagttactcatcgaagatgaatatatttgatttggtgatgagaggcttgtatgttgtctttttgtttgtatgtttgtttttttataagtgctgatgtactttcaatgggcatcctccctctaacaggcaacataacatgtagtgcagatgagttcacttgctccagtggccgctgcgtctccagaaactttgtgtgcaatggccaggatgactgtgacgatggcagtgatgagctggactgtgctccaccaacctgcggagcccacgagttccagtgcagcacctcttcctgcattcccctcagctgggtgtgtgatgatgacgcagactgttcagaccaatcagacgagtctcttgagcagtgtggccgtcagcctgtgatacataccaaatgtcctaccagtgagatccagtgtggctctggcgagtgcattcacaaaaaatggcggtgtgacggagaccctgactgcaaggacggcagcgatgaggtcaactgccgtaagtaactttccagttcaattccatgcgccaaccggaagccatttggctgacttcattccatcattgttaccttctttcgtagcttctcgaacctgccgacctgaccagtttgaatgtgaagatggtagctgtatccacggcagcaggcaatgcaatggcatccgagactgtgttgatggctctgatgaagtcaactgcaaaaacggtgaggttctttctccattgtgtttggttaggctattggctactcctgtcagaacagcagtggaacttttctcctgtgtttgaatttatagtcaatcagtgcctgggccctggaaagttcaagtgcagaagcggggaatgcatagacatgagcaaagtatgtgaccaggaacaagactgcagagactggagtgacgagcccctgaaggaatgccgtaagtgagagggaggcttgctcggggccagagctgagaggttccattcagccctaatgctgttttggacacagcttagttctctgttgaactcagaatgagctaatttttaatagttaagcttgaagataaagtatttcaaagtggaattttagcccatgacaaactaactcagggttgagaaaccccttaagatagctaaaagtcatagcaaaacttgagtaaatccttaataactaactaccatccagcctgaaatgtatatctcccaaacacataataaaatctttgaaaggccatcaccaatagccggagactgaatgtgaataagacaactatcaattaagaataagatgtcgccaggcggtggtggtgcatgcctttaatcccagcacttgggaggcagaggcaggcggatttctgagttcgaggccagcctggtctacagagtgagttccaggacagccagggctatacagagaaactctgtctcaaaaaacaaaacgaacaaacaaacaaacaaaagcaaaacaaaagaataagatgtcatactaatttggactctgggtttataaaacagaaaacaaaatgaccactaggaaattgggagggagatgtttgtgcagcatcttcagagagttgggtggagtgtcatgttggatatgatcaaaatacattgtatctgtatgtggaagtctcaaagaataaatctaaaacattgtattcaaagcaaataaataagctatcagatgactctgctacccttttattccagatatcaacgaatgcctggtcaataatggtggctgttcccatatctgcaaagacctagttataggttatgagtgtgattgtgcagctgggtttgaactgatagataggaaaacctgtggaggtgagttgaagcaaagagcctggcccctggcggacacgggaaagggcaacatacatctagtgaggcataggaagaacaagactaattctaatttccctcctagatattgatgaatgccaaaacccggggatctgcagtcaaatttgtatcaacttaaaaggcggttacaagtgtgaatgtagtcgtggctatcaaatggatcttgccactggcgtgtgcaaggcagtaggtaaatagacttgggctggtgttgctctggtacctttttgagttagtgattctaaaaggtacagttggtgactgcagcagtcaacctacacataaagtcacaccccagagcaatgctattaaactctgagtgcagcaggatagctgaaaataaaccatcttcccacacatctgccttggtccttccttttgcataggatactgtgaatagtcaccgtagtttcttcctttctgcttctaaaactgagcacaattcaaacaagtaacttgtttatcagccaccctactttcggatgctgtaaccccaagactgccttcctaaacagggtggaaatacttgcaggtcctaggggaggggaggggtgcctggaaatccaggctggatactactgagatgttcagcagtatctttacaagtggtcctctgtggagaggagatgacttagaggatcttgccttcgagcaaaactaaatcaacctggcttatgtcttgcaggcaaagagccgagtctgatcttcactaatcgaagagacatcaggaagattggcctagagagaaaggaatacatccaacttgtagagcaactaaggaacacggtggctctcgatgcggacattgcagctcagaagctgttttgggctgatctcagccagaaggccatcttcaggtaacttccacttgcacccctgatgtctgggaatctacgtcactgtcattaggtctgtggaaaggattggagtatgcatgggtcttctcttgtctgtgactcctatctaccatctacttagctaggagttttaaattcaacactgatttatttttagctattaaatgatcaccagaagttaccttgataatcattgatcatgatgtaaaaggtgcctatgcctgaatatgacatcagaatttctccccttttgtggttgtgaactgaattgtcttgctacaaacagaaatgatagcagcagctttccctcagttgacaccgtagacccaagatgatggctactgagttgaatatctcttttcaaattttgctgggctttgagctcgtatctagagttcatatccacaactagataagctaaagtattactaattttccatccccaagcaacatggctgaataatttctgtgctgagcgatggggttcctagagtcttttcagagtaaagtccttaaacattttgtaagcagaaaagtccattttgcagggtccaatggtgacaacttttaaatctcttgtgacctattctgtttcagtgcctcaattgatgacaaggttggtagacattttaaaatgatcgacaatgtctataatcctgcagccattgctgttgattgggtgtacaagaccatctactggactgatgcggcttctaagactatttcagtagctaccctagacggagccaagaggaagttcctgtttaattctgacttgcgagagcctgcctccatagctgtggatccgttgtcggggtttgtattctatgttttccttcacttagcctttttgggtgcaagccacagaggttgagagcttttctcaaaaagagctcacttgtcataagaattcccagaaacagaattagctggtacaagacatcaaggacagtgttcattgcctgcccccctttctcctttacacccccccattaattctctttcttccctgatctcatgtctctattcctctttctctctctctctctctctctctctcacacacacacacacacacacacacacacacacatacacacacacacacacaatttatctttataaagtctaggatctataaatttgttggcatctttcagtgcttaatatgatcacctacagttgcctccattttcctgaaaattacttcttcttcttcttcttcttcttcttcttcttcttcttcttccttcttcttcttcttcttcttcttcttcttcttcttcttctcctctatggctaactaaaattccattgtgtacctgataaatttgaatgaaaatattctcttgaaaccaatcatgatacataatgaatgtgtactaatgaaaataatgctgtgagtgacaaaatatggagcctccctgggcagctcttgtatgtgatgggcnnnnnnnnnnnnnnnnnnnnnnnnnnnnnnnnnnnnnnnnnnnnnnnnnnnnnnnnnnnnnnnnnnnnnnnnnnnnnnnnnnnnnnnnnnnnnnnnnnnnnnnnnnnnnnnnnnnnnnnnnnctccctctccctctccctctctctctctctctctctctctctctctctctctctctctctctctctgtgtgtgtgtgtgtgtgtgtgtgtgtgttggggggagggttagagggtggagagacagagagatagatagagagagacactttactgggttagttagctgtgggtgctcaaatctaggacttgcaggaaatgggatttgcataaccctgtcccctcaacggcttctatttaaaaatgcagattacgtgaaagttcaattgagaggaacagatttttgtcaaaatgtttcactgaggcaggctgcttagatagttgactgcagtgatcacaattggtccctatgaatatcattagaacataatccccaagctcttcttatagagcttacagtaaaacatctccttcgtggttctgaaagaatgtgcctttgaaaaggaaatggtactttggactgatagttacatatcagatcaacgcagaataacatggctatgacttggaaattatattattgtctccgatagtcctgaggagtagacctagagcctcacacatggtgggccaaatgttctaccactgagctgtgtctccaacccttgtgaattccgactgttaagtttaattcactcaaaacataattagagtcttaagcatcagcatttatctcaagagcctcaagcttaagggtttcctgatcattctttaagcttttgttctaaggtaaaactttattccttctaatccattaagacacttctctgatttcactcttcccagctttgtttactggtcagactggggcgagccagctaaaatagaaaaagcaggaatgaatggatttgatagacgtcctctggtgacggaggacatccaatggcctaatggaattacactcggtatgtatgtccttccctgttactgactagttaactacctttataatttttaaatgcatgcccgatataaatttgaaatgattcttctagtcccacctatagcagaaacttggggagaaagtagctaaacaaaaatggcagacttaacaaattatgggtgccagatcactggcttgtcatccagttgatctaatatgcaacagaaactcagggaatcttggatctttggggctctcatatagaatactataggcattggtgcctttgtctttcctgggtggtaacttgtaactgtttccttctgaattatcttggaagaaatacaaaatacaagcctcctcctctaatgtagcagattctgagtcaatgactttgagagtcttagaaatcccattgaccctcacagagggaatgcagacacattttcttttggtgacttcacaagtatttatagtgttctcattaagagctcctgatagagaggaaaccataaagtagaatagattctttgggtgttttaaatagaaaccagagcagcaatagctcaaatcatgtcaattcttttcctgcctagaccttgtcaaaagccgcctctactggctggattccaagttgcacatgctctctagtgtggacctgaatggtcaagatcgtaggatagtgctcaagtctctggagttcctagctcatcctcttgcactcaccatatttgaggtaagactcgtgactcacgtctatgtggacacttgtgaagcagttctagagaaaagagcagtagacaactgagaaacctttacctaaagcctggaatacaatagacactaagtgcttaaagcctggaatgtactagatgctaagtccacaaagaacttgagtctcttgcgccttgtactcagtattccaaagaatcatgcagtaaccttgcgccattaaatgtcaagtaaatcatgataatcttagcttgtgatttgtgccagtcttgggtctacatgctaattgtagggttctgttttaggatcgcgtctactggatagatggagaaaatgaagcagtgtacggtgccaataaattcactgggtcagagctggccactctagtgaataatctcaatgatgcccaagacatcattgtctaccatgaactcgtccagccgtcaggtaacatggaggtgcccactccctaaagaccatcctaaaagagtattatgatcctcaacttactacttactggctccttagcaattcaactcactttaaaattggaacctttgtcctcttgaaccctaggcccaactcaacacttgatgcctgatatttcctttcagccatcttaaagaaatggcttgagagtcagctcttagctccttctaacccctagtggcatagctttcatctacatcttttgggtcttccttgctgcacctgttgtaccagtttccatggtaaccttcaggccacagatactcctcaggattagttttctaggtttgctggagcaaaataacacaaattggatgccttaaacaacagaaatttgctgtcccacagtctggaaactaagagtataaagtcaaggagttggcaatttggttccttttggagacttgagggaaggctctatccctctcttctttactagaagatggccatttccttacagtatctgttcacatctccttttggtacatgtttgtacccatagttcatcttctgggaaggatactggacacttggggtttagacctaccctaatgacctctgtcaataccatatctgaaactaaggccacattctaagatattgtcagttaggacttcaatgtgcaaattttatggagggacacagcctaatctataacaccttttcttcaccataacacatcttatataggatttaacaagttatcaattgtatctagtcatgtttttctcttgcccagaacaccagcttgtctatctaatgagaccctcacacctctctggctgagttcccttacactttgtaggagtaagtcaatataaagccaggaaattatgagttgtctccttcttctgagtctttgctctgagctttggataaacagtatgagccaggcctgggttctttctcacctactcatggaagacataactctttcttagtctacttccaagaagcctctgaatcaggtatcttcagagtgtatttccagtacactgagtgatacccattcgacaccagtgatacccattcttctttgatgttcggctcacttgaagaactgatagagtagacaaacgtaagctccacagagactacaggtagttaacactacagtgcttattttaaaggacttttttttcccccaactaggtaaaaactggtgtgaagacgatatggagaatggaggatgtgaatatctctgcctgccagcaccacagatcaatgaccactctccaaaatatacctgttcctgtcccaatgggtacaatctcgaagaaaatggacgagagtgtcaaagtaaggctttcagcgtttcaaccacaagcaagacatagaacgagcactgcaagacaccagctacaacttacctggattttagagactctgttgtggctaacctttaaaattgatttcagaataagtgattaggtattacggttgtatagcaggcattcattctatctgtgctttggggctcacctgtgacccatttcaacatcagttgagtttagaggggacaaaaatatcaatgtgccatatggtaacttgtccccattgctctataacaccccctgagctagtcaatttttagctaattaaagtcttccatagagagctaaaccagtatatgaaggcacttgagtaaggaggccatggttccaggatgctactagcctcagtagatgacacaagtttaaactcacggatagcctgaacttgaattttaatagtttgttctcagcttttgattaaggagcaaactgaacttcctgattgtaagcaaggagctcacatagtgatgtcttaattagcttcattatgtagtaccataataagcacttagtgttcttagaaaataggtacaagaccccctggtgtgcactgcatgctagagtaattttgagaacatttgtggacatttcaggagcttggggctttcttgagagggatccatttgtctgaatttttctgagttgtcaaattccacatgctgacagccctgcccaacgtttcctaatttccggattctttgcacaaagctggctatttctgtccattcagatatgtccactttaccagttaattccgcagtgggttgtctttattacctggaattaaaataacctttcagcattacttctctggactacacagtcagcaactcaggaaccttggccttaaccgggttcttggtttttataatccaggtacttcaactcctgtgacttacagtgagacaaaagatatcaacacaacagacattctacgaactagtggactggttcctggaggtattgggtccagcactgcaaactgttaatctcaactaactgccgcttaaataattagtgcagcttttaactactggttctgtcccaactggctacttgtgcctaaagcccaaagatttagaccctgcacatcctggatttctcttgacttatttaaacctataggtttaatgtaactcaaataattataagcctaagttcttctgatatctaattataatggatactagaaatcaatattaagtacaaaggtataaggatctctacctaattcgtagatgtctaagtcttaattcaaatccttatagactgattacttgtatgtccttgtagggatcaatgtgaccacagcagtatcagaagtcagtgttcccccaaaagggacttcagctgcctgggccatccttcctctctgtaagtaaatttgcttctcatatagatttttatggacaattttagttcatctacagccaccttccagtggtctcttttgctgtcctaacacatgtgacactgaattccatttacctcctcacctacctggcacctactcttcagtgtcatctttcccttgatggtgaatatccatcagttatctacaagatcttatgggctgttgaacatgttaaccttgcttatccctatttagaggaagtatctccaataagggtttcattccagtcccatttattgtatatagtcattcacaaagaggagagacgcaaatggtcaaatgctttttgaatgagctgtagaattcatgaagagtaaattaaaagtagttaagtattttcaaactcagagaaaagcatctctaaagccactgtcaagcaggtgaatttgaaggcactttgctttactgtccccttcgactgagcttactggttgacctaacacaccagaaccacttgactagcatgccaaaggcttctgtaattttttatgtagctggccttgggttagggctcaggactctatacttccctgggtgtacttcccccaactccagtgcaaagattcacacaaccactgggctgaatttatttcaaaactttgtctcatctatattccaacttctagttgtccaagctccctaaaacatggaactgttgttagtgttaattcccatagatccataaacattagactccatttagtcacctctgattttttttttcagtgctcttagtgatggcagcagtaggtggctacttgatgtggaggaattggcaacataaaaacatgaaaagcatgaactttgacaatcctgtgtacttgaagaccactgaagaggacctgtcgatagacattggtagacacagcgcttctgtaggacacacatacccagcagtaagtatactttgtctatattcactggcttgacatcagttgcttccaaggagactagaatcactagctatggctacctgggctggggaggagcattgaatcccagacattttatccaatgactgcttgttaaatactaaatgtctggtccatgagagcagtcagttaataagcatttcacccacagaggaaggggaggtaagtcctacctggccttattttagatgatagaaatgacatatgaatagtgtatgaaccaacaagctcctttgtaaactttgattccttgcatactaatacctaaaggtaaatcagtgtggacacatgagaattgtggatagaggagttgactgaaagtcaatagcttgagtaagattcaattagccaaaagtaataagtgctttccttggagaggtgctccatcccacccagagagacagctttctacaagagcaacaacagcaatcgcttgttcttccactaaaaactcaagtacatatttggcctccacttcaggaccatgctgactgaaccatgatgaacatgaacagtgtccttgcatgatctctggtggaacagggagtaaggttcagtgcatatcatatatcttttcacatttgtctttaagatttatagtccgtaaacagaatcagtcaaagtttttttccaaccaagtaggtacaagttaaatatcccatatttaaaatacttggtgtccaaagtgttcagaggggcatggattttgaagtttttgcatacataagaagtttgaacacaaaatccatttgttttatatacactttacatgacattttgatgtatgttcattttgaccacaaccaataatataaggttagatgtagaatttttcttttgtagtgtcatggtgatactcagaagatttcagacttggaatccccttttgaattttagattttcagcttggggtacataaaaaaaataataatgttatgtttctgacctccaactcttttggtctttaaatggcctactcaaaagcaaagtccactccgtagagtaaccgccaagctcacctgaacctttgtcttctctgcagatatcagttgtaagcacagatgatgatctggcttgagttctgaacaaatcttggtctatgaggtctacaccaataacaccctactctggaatggtaacagagccagcgctgaagtctcctttcttcctcccatctggaagaacatcaagatatctttttgtggatcaagtttgagtacttgatcatttttatattacttttgtaaatattcttggccacattctacttcagctctggatgtggttaccaagtatctgtaacccttgagcccctagacagtattgccatctctggccaaatatgcactttccctagaaagccatattccagcaatgaaccttgtgctatagtgactcccacctgtacatacattgtataggccacctgtacatatcccagagaacaatcactattcttaagcactttgaagatatttctatgtaaattattgtaaactttttcaatggttgggacaatggcaataggataaaacgggttactaagatgaaattgcca

SEQ ID NO: 40 - DNA, 3235 bp, Mus musculus
tccttccccctcctcctcgtctcctccctccccgcccccacctccttcttcctctccgaagggctggtaacttgttgtgcggagcgaacggcgacaacgacggcgcgacggaggcaccatccgggcgggcagcatgggcacgtccgcgcgctgggcgctgtggctgctgctcgcgctgtgctgggcgccccgggacagcggcgccactgcaagcgggaagaaagccaaatgtgatagctcccagtttcagtgcacaaatggccgctgcattaccctgctgtggaaatgtgatggagatgaagactgtgcggatggcagcgacgagaagaactgtgtaaagaagacgtgtgctgagtctgacttcgtgtgcaaaaacggccagtgtgttcctaacagatggcagtgtgacggggatcctgattgcgaagacggttctgatgaaagccctgaacagtgccatatgagaacatgccgcataaatgaaatcagctgtggcgcccgttctactcagtgtatccccgtgtcctggagatgcgatggtgaaaatgattgtgacaatggagaagatgaagaaaactgtggcaacataacatgtagtgcagatgagttcacttgctccagtggccgctgcgtctccagaaactttgtgtgcaatggccaggatgactgtgacgatggcagtgatgagctggactgtgctccaccaacctgcggagcccacgagttccagtgcagcacctcttcctgcattcccctcagctgggtgtgtgatgatgacgcagactgttcagaccaatcagacgagtctcttgagcagtgtggccgtcagcctgtgatacataccaaatgtcctaccagtgagatccagtgtggctctggcgagtgcattcacaaaaaatggcggtgtgacggagaccctgactgcaaggacggcagcgatgaggtcaactgcccttctcgaacctgccgacctgaccagtttgaatgtgaagatggtagctgtatccacggcagcaggcaatgcaatggcatccgagactgtgttgatggctctgatgaagtcaactgcaaaaacgtcaatcagtgcctgggccctggaaagttcaagtgcagaagcggggaatgcatagacatgagcaaagtatgtgaccaggaacaagactgcagagactggagtgacgagcccctgaaggaatgccatatcaacgaatgcctggtcaataatggtggctgttcccatatctgcaaagacctagttataggttatgagtgtgattgtgcagctgggtttgaactgatagataggaaaacctgtggagatattgatgaatgccaaaacccggggatctgcagtcaaatttgtatcaacttaaaaggcggttacaagtgtgaatgtagtcgtggctatcaaatggatcttgccactggcgtgtgcaaggcagtaggcaaagagccgagtctgatcttcactaatcgaagagacatcaggaagattggcctagagagaaaggaatacatccaacttgtagagcaactaaggaacacggtggctctcgatgcggacattgcagctcagaagctgttttgggctgatctcagccagaaggccatcttcagtgcctcaattgatgacaaggttggtagacattttaaaatgatcgacaatgtctataatcctgcagccattgctgttgattgggtgtacaagaccatctactggactgatgcggcttctaagactatttcagtagctaccctagacggagccaagaggaagttcctgtttaattctgacttgcgagagcctgcctccatagctgtggatccgttgtcgggctttgtttactggtcagactggggcgagccagctaaaatagaaaaagcaggaatgaatggatttgatagacgtcctctggtgacggaggacatccaatggcctaatggaattacactcgaccttgtcaaaagccgcctctactggctggattccaagttgcacatgctctctagtgtggacctgaatggtcaagatcgtaggatagtgctcaagtctctggagttcctagctcatcctcttgcactcaccatatttgaggatcgcgtctactggatagatggagaaaatgaagcagtgtacggtgccaataaattcactgggtcagagctggccactctagtgaataatctcaatgatgcccaagacatcattgtctaccatgaactcgtccagccgtcaggtaaaaactggtgtgaagacgatatggagaatggaggatgtgaatatctctgcctgccagcaccacagatcaatgaccactctccaaaatatacctgttcctgtcccaatgggtacaatctcgaagaaaatggacgagagtgtcaaagtacttcaactcctgtgacttacagtgagacaaaagatatcaacacaacagacattctacgaactagtggactggttcctggagggatcaatgtgaccacagcagtatcagaagtcagtgttcccccaaaagggacttcagctgcctgggccatccttcctctcttgctcttagtgatggcagcagtaggtggctacttgatgtggaggaattggcaacataaaaacatgaaaagcatgaactttgacaatcctgtgtacttgaagaccactgaagaggacctgtcgatagacattggtagacacagcgcttctgtaggacacacatacccagcaatatcagttgtaagcacagatgatgatctggcttgagttctgaacaaatcttggtctatgaggtctacaccaataacaccctactctggaatggtaacagagccagcgctgaagtctcctttcttcctcccatctggaagaacatcaagatatctttttgtggatcaagtttgagtacttgatcatttttatattacttttgtaaatattcttggccacattctacttcagctctggatgtggttaccaagtatctgtaacccttgagcccctagacagtattgccatctctggccaaatatgcactttccctagaaagccatattccagcaatgaaccttgtgctatagtgactcccacctgtacatacattgtataggccacctgtacatatcccagagaacaatcactattcttaagcactttgaagatatttctatgtaaattattgtaaactttttcaatggttgggacaatggcaataggataaaacgggttactaagatgaaattgcca

SEQ ID NO: 41 - protein, 871 aa, Mus musculus
MGTSARWALWLLLALCWAPRDSGATASGKKAKCDSSQFQCTNGRCITLLWKCDGDEDCADGSDEKNCVKKTCAESDFVCKNGQCVPNRWQCDGDPDCEDGSDESPEQCHMRTCRINEISCGARSTQCIPVSWRCDGENDCDNGEDEENCGNITCSADEFTCSSGRCVSRNFVCNGQDDCDDGSDELDCAPPTCGAHEFQCSTSSCIPLSWVCDDDADCSDQSDESLEQCGRQPVIHTKCPTSEIQCGSGECIHKKWRCDGDPDCKDGSDEVNCPSRTCRPDQFECEDGSCIHGSRQCNGIRDCVDGSDEVNCKNVNQCLGPGKFKCRSGECIDMSKVCDQEQDCRDWSDEPLKECHINECLVNNGGCSHICKDLVIGYECDCAAGFELIDRKTCGDIDECQNPGICSQICINLKGGYKCECSRGYQMDLATGVCKAVGKEPSLIFTNRRDIRKIGLERKEYIQLVEQLRNTVDADIAAQKLFWADLSQKAIFSASIDDKVGRHFKMIDNVYNPAAIAVDWVYKTIYWTDAASKTISVATLDGAKRKFLFNSDLREPASIAVDPLSGFVYWSDWGEPAKIEKAGMNGFDRRPLVTEDIQWPNGITLDLVKSRLYWLDSKLHMLSSVDLNGQDRRIVLKSLEFLAHPLALTIFEDRVYWIDGENEAVYGANKFTGSELATLVNNLNDAQDIIVYHELVQPSGKNWCEDDMENGGCEYLCLPAPQINDHSPKYTCSCPNGYNLEENGRECQSTSTPVTYSETKDINTTDILRTSGLVPGGINVTTAVSEVSVPPKGTSAAWAILPLLLLVMAAVGGYLMWRNWQHKNMKSMNFDNPVYLKTTEEDLSIDIGRHSASVGHTYPAISVVSTDDDLA

SEQ ID NO: 42 - DNA, 32982 bp, Homo sapiens
ctcaccccgctctccggccgccgccggtgcgggtgctccgctaccggctcctctccgttctgtgctctcttctgctctcggctccccaccccctctcccttccctcctctccccttgcctcccctcctctgcagcgcctgcattattttctgcccgcaggctcggcttgcactgctgctgcagcccggggaggtggctgggtgggtggggaggagactgtgcaagttgtaggggagggggtgccctcttcttccccgctcccttcccccgccaactccttcccctccttctccccctttcccctccccgcccccaccttcttcctcctttcggaaggactggtaacttgtcgtgcggagcgaacggcggcggcggcggcggcggcggcaccatccaggcgggcaccatgggcacgtccgcgctctgggcgctctggctgctgctcgcgctgtgctgggcgccccgggagagcggcgccaccggaaccggtgagtgaggacgcgcccctccgccggcgggcgggacccagccggggcaccgggagaccccgaggcgtaggtctccgtttgcccacccgcctcctaggaggcgcctctcggttctcctcgccttccctccctcccctccgtggtggcgcctctgagctgtcagcgccgaggctaaagggagccgggcttggggaacagcggggttcggggtgccccgacgcctcgcctgaactagtcttctgcccctcactccgcctcccccagagccgctgctttgcctcgtttctcgccctcttgacgggcgccgaggtgcgtgggcttctgagcattgaacaatggttctgcctcctctgccaggcgcagtgttgggaaggaggcagagggccaagacgtgtgcggcagcctcgggcgcaccctcgaaccccggggagtgcgggagcggacggggggagaaggtgagcgcctccggggacgcggagcgccaggggccggccgggcttcagagtcttccggcggccgcgagctggcgcacgttcggtgggcggcggccgggaggctccgcggagccgagggcacccggactgcgactcccccggcgcggggccgcctctccggcgtgcggggtaggggagcggcggggctttacgcaggactctgctctgggcgcttctcctctcccttttccccgcctcgggcggcgtttggaaaccgctcgggtctcccgtgtagctgaacgcggagggggagtggaggggagacttaatctggttagtttgctgaccctccttcccggtgacgtttcctcgagaggaattgagtcctaggctagtgactgtaattagccttcattctacacaatagctcaaaggagcagcgcgagagcgagcgtgtggccctgtcttgttgggaagggcggcggtgactactgtcgggtccccagactctgccgcgggggcctgggggccccgcctggtcgtcagccacgttcccacttggggcctcgtaactttcctggacaggcgacaggaagcctttctgagaggactcagtcggaatcctagcgcgtccccgaagtgatcttcagatgtgacgccgaggggcttgcttgccagctgcagggaattgggactgaaagccgcccaggcccttaacacccgttccagagtccctggctcccgtcgccgggtggcttcaggggccctgccggcctgcagtcacgtgctcctgaagtgagagcgaactttaaagcatgtggtcaaggagcctgtcgggcagcgcctggggtttttacgtctccgaatgcccctgccctttggttgccactgtccggagcgtgtgaactgggactggcctttccgccctctgcgattggttagcggtgcgatcacgtttaggttggtcacatggttccgcggactcttaagtgggcagcatgggcagtgttattttcaatggaaagtaggagactccacaggctcttacgggctgttctctcaaatgccttcccctgcctggactctttgaagaggacgaatgtgtagtgaacatggaatctgatgtgtaacaagcctgagagcctagaaaagctctgcttacaagagtttccaaacgctagcattaatcattaatagatgagtaatactaacttattaaacgatttctcagtatagtgccatgacttgcattatgccttttgtaacatttcaaaacgctaaggtataccagaaggagggacaattatccaggaaggtgagagaaaagtttcgtttttgctgcatgtcccttccactagaggttaactttaccttatagaatgctaggaatgcacctaaactactgacatgagttagtcaaagccagatgttcaccttgtattgggcaggtgaggatccttttcactttgtcacatgtgaaatatttgacatgccatgaacaatggaaaaacaaattcttcaaaggagaggaagcagattcttccagaactggaggaaatttgggctgaggcagttattgaccctaaaccaatcccaaccggcatctgtcttaagttcaaagtctcagggcatgtgggctgactttctaccctggagcttctacacataccccttctgtccactggcacatggtgctgttccacaatactcctggacaagacaggtgaacactgagactctggcaaggaacttaaggctaacaagaagttggtatacctgattgcacaattcctgggggttctgggacattttccttcagcctaagtagtcaagattaagatctgtggtatgatatattctttaaggccagagtctaaaagaaccaaggttttttgagagctattcatatatggctagcaactagcctaagaatagaaagaaaattccctcattgtgagaagtgggttggtggtactggtggtagtaatagacctggaggtaggaaactggttggcatggaaagtaaacttggctcatccagatagcaccaatgaaggtatgacgatgatagtaccccttatcaaagactgatcactcatgtgagcagggactgcgtaaaggaaggtcaccagccaagccctccttggcagtaacagcttcatgaaatctagtgtagctttgttccctggatcaccctcttgcccactttatgtggcatttacctatagtgcctgtcctgtgtcattttgattgtttgcttttatggcctgagtccccagatacttaaagcatgtataaaggtcaagtagagctgccaaatattaagactttagtacaatagactgctatttaacactaaacattgctagcaaaggtgacagtctccatgctcaaaagaagtgaagacctgatccaagtgtctctacctgtcataaaattgaataaccgtaaacttgacttgagtagtttcattacagttttggaagaggaaaaaagttgttacaagccccttctgctccaggagaggtatcaaattgataagacttaacaagaactcctagagtagaacatgaccataagatcaagggaacacatagtacccagccgtgtggcttcgggttttgatcccaaaccttgaagacttggcacacagcatagaaatacagctaattcattttaaatatctagcccattttctgtttctcacagaatgtaaatttgttcttttcagtgcagggaaaagtgtttaagacaaggcagttgcctacgtgacttaaagtaatgattgcattcactttggatactgactttcatttggaaaaccaccttcacatactagcctataagaaattaaatgtattaaagggcttgatgaggtctataatgatgttcgttgtaaatgtacctgccttagggagctccttgtggtggctaatacaactgccctctacatggttagttgataaattcaaaattgcttagtttggtccctactaatttaatctcaaaagaatacttggacaacagagtgatagactactttcaaggcaaacagtccaaaaatactgtctgctgaggttatgggcgagatatacttgttaagcggaagtaagtagtccagggacaattttttctgccacctaaagagttttgggctagaaaatctgaggactgatagtttttctgaagagttggggcagagtctaacctagctataggcgaatctggcttttaagtaaaaatcatctcaattttactgtctgcatttttcaaactaaatcagtgtctctttgctaagttcgtctattggcttgcaacaaaaactctaaacactgttaataccacttagttaagtacactaactgcactgcaggaaccaaatgagatggcaggtgataacacaggttaagtgtcctttatctgaaatacttgaaaccagaagggttccacagagtttagattttttcagattttgggacattcacacatacataataaggtatcttggggatgggacccaagtctaaacatgaaattcgtttatatttcacatataccttatacacatagcctgaaggtaattttatagactatttttaatgattttgtacaagaaacaaagttttgactgcaacttgtcacgtgatgtcaggtgtggaatttccacacttacggcatcatgtcagcactcaaagttttggattttggagcatctcagattgcggattagggatgctcaacctggaccataaatttagcatacttttccccttgagtgaagtctcctaggaaagcttgggcccaacagttattttgagtctctaagcaagagaatgcctgttaggtcctgtgagagtaagtgtggagattctgttagaaatgtttcaatgcttgcttagagatcctttgcctactttgtagtttagagatgctggaaactataagatgaagcctctggctagagcagctgattttgccaacttgggggccatctggggagcctttatgtatgtagacgaggtggtggggatggggggacttgcaatttgccaaccaagggacataacaaagcctcggcgatagacagcatttgtgagttacatcacatgttagaacttaatagttctcccacatgctgtgaataaacagggtttctattttatagactgcctctaatctttcattttcttaagaaagacttccccacatctgaggtattaactgatctgtatgttcactaagtaggttgcagattgatgttggtcatctttgtgcatcttctggaaaccacttaatgtacatctactgagtacctaccatatggcaccaggcatggggacagagtgaccatagcactggtggttccttcctttgtggcacttagtctagtaggggaatcaaagcaggaaacagccaaagaccgcttggaatagaagctctgaagaggagtgagcagatccagtgtttaagacttaatcataaaagaggcagatagcagctggagatttctggaatttccatatgctatctgggttctagcttatgaagtttccctaaaattaccaagaacttagactttaatttcaaaaagccagaaataattctatgtctgcagataatcctacaaaagtgatatgactaaagcaacaatggattactgccagtattaccaaagagcattaaaacatgtcagaagtaaaatctgcgtctgatatatcacactcaactttaccagttagccgctgctaaccttctcaggtgttggaacctctcttttcacatggaaatgaagccaacacacccaaagggacacactcattctgacagacaagtgtgtgaaaatgcactgtttttaaatgataaattgcaacaaagaggccgggcgcggtggctcaaacctataatcccagtgcttttggaggccgaggcaggcagatcacgaggtcaggagttcgagaccagcctggccaacatagtgaaagcccatctctactaaaaatacaaaaaaattagctgggtgtggtggtgcgagcctgtaatcccagctactcaggaggctgaggcaggagaatcgcttgaacccgggtggcagagatttcagtgagccgagataacgccactgcactccagcctgggctacagtgcgagaatccatctcaaaaaaaaaaaaaaaaaattgctacaaagatgaggtgaaggtaccctcataggcctagggaacagggacctttataacctagagtctttcaaagtattctagctagtaaaacaaccagtcacacttggtttcaagttctgaaaaagctgggggaaatgtttttgacaaaagtttttagttcagaccagctttattagtaaactaataaatcaactcatgcacccaagactaccaactagtgcctagagaatataggatgtcaggcaccaggtcctgagttacaaatgtgaactgcagcccatgccttaggggatctctgtgtctaaaggtgaaaaatggtagctgaactcatctccttgggtgatggctctgtgacagggactattatgagaaagcagccagaccatacctagtttttccaaaaaaggcattgaggcctcattcaagaatacaatctgagcccactcctggtgaatgggtggacaagggcaacatgaacaaactgagacaaagcagccatgaggaagggcaaagccatggggaagtgagtgggtcccctttgagctgttagctcagcccgtatagcagatggtgggtagtgaccaatagggaaaagtctgaggaaattagtagggaacttaatcctagagatagtggtaagccaagaaatgaccccattcttggctattctaggttgcttgaatcactaggttgcttgatatgggtagagaatgtggcagcctggaggcaaaggaacaagacatttaaattgacatcaggtgagaggagggcttgggcatagccagggattgatggccaaatgtcagggaagaatttgggctcatttctggagtactgatttagagtaagtaatggggccaatcaaagatagactacacagggagggaaggatggattttagaagaacctctgcctagtaagacacccaaataaattttttctgcaaaatagttttgagggctttactcacatgttactatcatgtgtattgtaaaagaggcatttatctcctgtgtccctcctgtgatgaacattaggccttatgagggtgttattggtatatgctacaaccctgaaaatgaaagagccacttacattatgggtagaagctgtagcttcttaaccttagtgcagtggttctcaaagtgtggaccgaaattggcaacattaattcaatgttaattgagttcatgtgtcaacattgactcattagaaatgcaaacttaggccctgttctagacctgctgaatcagaatccaggctggggcccagcattctgtgttttaacaagccttcctggggattctgatgcacacgggagcttgagaacgactgacttagtttaccactcacagaagctaacgattttcaaggtatatccgatggagggcctttcctctgacttgaaccctagacaagaaaaccaagagctataatccttttagaagacttgctgaggaattctagaaacatttttaaaaacttagaatgaggaaggaaagcaggcctccatctcaacaacaaggctaaatctaagttgatgcttagtaacacagtatctagagccagtgcctgggttcaactcctagctctgcccagggcaatctgggacaagtgactgtactttccttctctaccaggtttcctgatctgtaaaagaggaataatagggccaactgtgcaggattaagaattttaaaagctaagagatgtgaagtcttagagcagtgtttgaccaacaacaaaaacgattcgattatgtccatgattcttaagatcaatttgatgtaaatggaaattgaatgtaactgacaattgaactgtaaaattcacttatttccatgactcagaagaattagcctacatattcaccactttttagtggcccccaaactagtgtttttgttgctgtttgtttgtttgttttcgagatggagtttcactcttgttgcccaggctggagtgcaatggcactatctcggctcactgcaacttctacctcccaggttcaaacaattctcctgcatcagcctcccaaggagctgggattacaggtgtgtgtaatgcctggctaatttttgtatttttagcagacactgggtttcaccatgttgaccaggctggtcttgaacccctgacctcaggtgatctgcctgcctcagcctcccaaagtgctgggattacaggcatgagccaccgtgcctggcccaaactggttcttacaatgtttcagaggctgactttaaggccagagcacaatctttgtgcttgacagctcagaacatttcccttaacacctgttgtggtactttgcctcttacaaacccttctccccttaggaaaacttttttgctgactcagaaatttgcttgtcctgaaaggagttttagcttacaaatagaaacactgtcattaaagtggcaagcagtagaagtgaactagactaaaaataaatgcccttggtggccccagaagtgccaaaacaaatggacggaaggaattccagcaagtaacacccatatgctcaagcaatgagtaagggcatgagagatgtaaatgcttggccctggtggccccagcagtgtggcagcatgagcctctgtgcaggctgaagtacgctctgagcctggtacccagagacactttctctatattctgggcatgcatcttggagtgctcctgccagggtgctgctcggagccccatagggagatttgtagtccgtttggaaggcttggtatttactcgaaggcctatgcagttttttactgaagcttatgtattagtcctccatgtcaaccgctacagggaaaattagacaatggcggctgacttctatatgcattaaaaaccctgagtttccctctaggacattggtctagacaaggaatttatgaaaaagacctcaaaagcttaggccacaaaaacaaaatagacaaatgggacttaattaaactaaaaagcttctgcacagcaaaagaaataatcaacaaagtgaagaacaacctgccgaatgggagaaaatatttgcaaactattatctgacaggagactaatatccagaatatacaaactcaaacaatggggaaaaaataatcccattaaaaagtggagaaaggacatgaatagacatttctcaaaagaggacataaaaataaccaacagatacatgaaaaaatcgttaccattactaatcattagagaaatgcaaaccaaaaccaaaatgacatataatcttataccagtcagaatggctattaataaaaagacaaaatacaacagatgttgctgaggatatggagaaaagggaagtcttatacactgctggtgagaatgtaaactaatacagccaccaaggaaaacaatatgcagatttcccaaaaaactaaaactggaattaacatttgatccagcaatccctctactgggtatctacccaaaggaaaaatcagtatatccaagggatacctgcactggcatgtttattgcagcactattcacagtaacaaagatacagaatcaacctaaatgcccatcaataatgaaagggtaaagaaaatatggtacatatacacaatggaatactattcagccatgaaaatgaatgaaatcatgccatttgcagcagcatggggatggaattggaggtcattatgctaagggaaataagccaggcacagcaggacaaatatcttatgttctcaatcgtatgtggaagcttaaatatttcattccatggaggtagatggtagaaagatgacagagactcagaagtagggggaaagggagagcagatgaaaggaagtgggttaaagaatacaaacctacagtaaggtagaagaaataacgtcaatgactgtagttaacaaaaacgtgctcgcgtgatggacaccctaaatcctcggatttcatcagtatagattcattacatacatgtaacaaaattttacatgtacctcataaatttatacaaacaccaccaagaagaaccctgtttttcttggagccagtgaactgccaatgtgtctgtgtagcaaagttaactacttagagaagcaaggctcccaggaaaataggtccttgaagttagtgtgcatattctatagtctgattccatctatataagtgacagtaaaagtgagaattttttgacgctccaggaattcattcattacaaatttaaataggcacataagtgagtaggtacaagcgacttccaaccccctcacccaaaggagcagagatattctaaggattagagctggaagaaaacctagacaatttcttaatagaacccttttcaaattcttacaccaaaatccaatattcaaaagaaagtcttggtagaggcagaggtggaacacccagggcctctgctactgtggcctttccctccacttcaaccacccctctagcctgaggcattcttgtgaaacctcatggctttaaggaacccactaacaattgcattttgccccatcttctcacctgtctgagcagaaatgcctagcacttctacttccaaggtattttttgaggtgtcattggctttagtttagcctgaagaattaaaagaatctcgagtgtagatgatttcaagctcaacttgttccctttatgaaagtataatactgaatttgagacgtaactttcatggatggaaatagactgcaggtccacaatcctataatcccaaagctttggaaaccaaaagcctcttaactcatttggtgctttcagttctcctagagctctgcacagcagcagtcccagctgagcaccagaggtggataggtagaaccttttaaaaacttgaacagaaaacttaacagtgttccagtcaggtggctaagggctgggcattcgatttagtgtctgagctctccctctctgtgggaagcagagaattaaacagaactagggagcactttctgcccagtagcagtccctcaaaacaaagtgcttaggaaactaggaaacgaagaggcatagccataaagcttaaggtctttatttgcctgtctttaaagagtcctttataaagccagcttgtcttcccacccccaccccaatgtcattcttttaaacaggcagggacattttagtagcacactgtactcctaatgcctgttgctactccttattggagagagagagagagagtgtgtgtgtgtgtgtgtgtgtgtgtgtgtgtgtgtgtgtggttgagagagagggagtaaaacacagctttatgatgatcaggcagaagcttgagtaaagtggaaatatctcggataagaaaagctagaaattaaactcctttttggcttcggatattttcttagtagaaaatgctgatgcctgtcctgagtctcctcaatatagactcttagagcagagctgctaggattttaatagaatttattactgttgatagcttgtatattacaactaaattcagagaccctctttaaggcaatagtagagtaaatatcagccttgggatactgtatgcccatacttaatcccaggccactctgagtgcctaggaaatctgtagcttcaaactcattcttaaggaggttgtcttccaggtaccttaaccctgaggtgggaaactatcaattgacattgacctttaagttgctattcaaatctgattacaaggtttccattttgattatgtagatatcaatgtcaatgttgttgtctcattttgacttaataacctttggtaactaaaaccttaaaaaaaaaatcagaggctttcagtctttactgtatcttaactccaacctgactattctttccaagtatatttatacctatgttctcagactacaaatcattcttttcctgattactcaaggtagagtcttaccactttcacagtccccaaaggtagtaaggtcatatagaactgcaagacacgtaccctcagcattgagaatattgcaaacatattaagaatccagtggcaatgaggggagaggggagaggcaccaggtacctcagatttggtttagcagtataaaacaacacaggtgatgcttcctgacaacaatctctaccctcctctagttccccttctaaatccctagtatattacaaccaataaaacgtgaagaatgaaaaagtattatgaaatgaaggtaggaaaccattctgctttgtagctgggtcctagcttaattagactcatgggagcagagtgatagatgcagttttaaaagcaacatatttaatatccaaggaagtaaccacacccatatggtcatcttgatttgggccaaattttaatctccctgggaagagccacaaagcacgaaatgctcccagacagcagggagtagctgacactagggagaccaactagggtattgtgcacgtaacacaagagttccagtctgtgcttgtctctgtaatatcagttcttatgccagcatgccacagctgcaaatgctgaaaggtggcaggaaatcggaaggccttctgctgggacaccctccctaagtaatctgcgtgaactatatgattccactgtttttctcaaatatttgcagtatatttgctttaagggccacatctgtgccttttatcgtgaagcaatcacatccgccagaaggacggaactgctaatgataggaagcacctgaacattagctggcctgtgccgggcaaaacaccaactgtcccacttagaagtcttagttcacaccattgtgtgaattaaatatccatacattaagcatagaaaaccagattcagagaaatcgaatctacatcttcagctccacctcactttcctttcctctcctctttaaatgacaaatgatcttcctttccctcttaactatactttcttgttgcttttatcttggagctgttttttaaagctgtgtttttccaattagacctcagtttctaagaggaggaatcatgtattaaatctctatttctaccctattcttgctgctccttctaaatcttcttcactgtgcttgtaatagaaacatcattaatggataatagtatggatgtggacaagaaatgccattaaaggattaggacttggctgattatagccacacacgtagtttcaacaaatgagagaaatgagtccacaggcagagatgatgccccttgtggtctctgggcaatctggattccttctattttcgtctggctccatttgcccgagatcactattccagccaccatgcccaattttcaggtaccaggaatgaagagatggaaagaaaatggatcctctatcctcttaaggacatttcccaaagttgtatataccattttagtttacattccattagtcagaatgtagccccttggctgcacctcactgagaaagaggcttgaaaatctagtatttagtcttagcatgcacccagctaagaacgcaattactgtcagtcactggctgaagagccatcctactctggcccttaggatgtcatagcctgccgagtctgcagtatccttctgagaaggtccccatccatgggtattaggtatcttgaatctataaccaatccttgctttaccgaatgttcccttcttattctagggagaaaagccaaatgtgaaccctcccaattccagtgcacaaatggtcgctgtattacgctgttgtggaaatgtgatggggatgaagactgtgttgacggcagtgatgaaaagaactgtggtaagtaaagagtttgatgacttatgcattttgttaaaatatgatgttatcttagtctgcaaatgtattgagattctgaaaataaaatccacttctaacaattgctttgaaagaatctatacttctctgtgtaaaggaataaaattgaatgtttgacgtggggttatcaacttgagaatggaatgataaggtgatgttccatttaaatgacaggacctagtttatcttagatcagacaaacgtggaataggaatctgggagaagggagaagaggaccagaaatagagacaaacagaagattgcttagaaggggcttttttccccttttaattttcaaatggctctgatcctagaaaagaaggcaagccatggacatgagaaaatcccataaagtttcagggggttaattaacccttgacatagaaactacaagccagcacagatcaaagatcagataaggattcttttttaattctctgcctacaatagttgctaattctaaagcattagcagggcggaagacattctctccccaagagaatggggatacagtgtcacagccatcaatcagcatctattaaaagatcactgtgagaaatgcctatgtatgcaatctatacaacctcatgtcaagccaaaatagctgagaactgcatggcaagattacatttacataccatgaatacatgctgaaatttgctctacgatccctttgttcagggttgtaaacattctgaaacaatattctatgtgaatattggtgctaacattgtcatttatcttttaaaagatgttatataaagatgttcactatacaaggtagaaatacagaagaaaagtagagtctaaatgtaggtttcatcaactgccatcttgttatgcctttacctacttcttcatgcatcattattaaaatgctgtaaagtatgcatcatggcagaccttgttctacacctgatctctcagagcagtatcacaggtgttttcatgccaatgtgtaaagcagatcagtagctcctttagaagcataagaaagtccattctaccatctcagggaagaaacttacatccagtctcaggaccaagaatagttctcctgtgcaacactttatcatcatttgcattttaacactaagattttaatctattccacaagacactgagtctcatgctatttctgggttacctaggtaatttagttctcttactaaatatctccttagagagtcctcactcttgtcaactattttcctgttgtaagttgcaattttttttcctctcttctaaacgatatatttggcaaaacccattgcttgttcttaaaaagtaattattctctttgtgttgcacaagtctttttttaccatgtgactcagtaggaactaacctgggtcaacttgggatttttctaaaatagtcttgtataagtactctctactagccacatggtaggagagtttggcaaagaaaaagaggtagatgtatatctaatcaagatcatttgaggcaggaaaaattatatccttagccaaaatttgtctctacttcctgtgtgtgacagtagagaaagaaagtagaaatattacaatcagggaaggtctgagtgcttactttgtttctctatggaagaggaaagctatagaattacttaaaacttccaaagctgcctcctatttttagtctaacctcttaatatggaacttggttacaatatttagcttagttctttatttccagtatgtcaatgggcatagtcaacttaaccttagattctattagccatgtgcttctgttggtcccattaactcattcttttataatgttaggctgagctaattaatcagcaacctaagtactctaaatatgtaactgctaattctcttcctctgtagcacatctaaattcctatttgtctctcaaggcccagttcacatatcctttctttaccctcccagtctatgctccaaatgaagagagagaaccatacggcaatttgtctgtctctgtttatcttttgctcaaacactgtggtatacagccaatctttcacatcctccttacgttttctaagacttaaaatcatggagggccgggtgcggtggctcacgcctataatcccagcactttgggcggcctaggcaggcgaatcacgaggtcaggagatcgagaccaccctggctaacacagtgaaaccccgtctccactaaaaatacaaaaaaatttagccggacatggtggcaggtgcctgtagtcccagctactcgggaggctgaggcaggagaatggcgtgaacccgggaggcggagcttgcagtgagccaagaccacgccactgcactccagcctgggtgacagagcgagactccatctcaaaaaaataaataaaaataaataaaaaatcaatcaatcaatcaatcatggggtctctttacagccattccgctactccctcttttgtagcttccaaagaatatcacaggttgaattatagcaactaaccctgcagaccctctgacttcttcctccatgctcaggagaacacagaccttgaatagcacttaattcattaacattagtgtttgagtttttcagtgattttagaaacaggcatgaatctaaagctagcatggccagtcttgtttccttggctgtgtaattcaaggagataatcctttatagatcatcataatttgtcaacccatcttgagttctagaaattaactgtaatcactgtctctctcctttacaatatcttactctcaaccagagtggtccaagggcacactctaagctctgagagttctacctgctttaaaccagtgatttgagaaacagtccctttcaaatgttcatcaaattgtgaatttttcacttatttaccttcacagaatatatgttatagaggaatgttttaaaatagaaattgggtagaaggtataagcatataggcaagaaagaatataatctaagaaagataagcttagggtatcctgtgtggctactttatatcaagattcatcctgctccgtgattccttcatgggtaggataatcaagctgcccgatttgcttaggacagtcctggtttatgcttatcttccagatataattaaaagtgtcccctttctgctgagactgtcccagtttggacaaaaaattgcatggtaaccctaagtataggggaaagacctgccccaggaagaattagcaacagaatcaattcctctccttaggctattttaacattagcaggcagttatggatattagcactgacagcttcaatgacttttagctggttgatgttagcctaccccttggctagaaaggctaaaatcttctctcccttgaattctaagtacaacatctcttgttacactgattgagttttctcccctttctacctgatgagtttctttgcccctgtagaccagtatgggtgacaatattcagtactggggtttggccttcattctccacactaaacacatgtgttgttaggggatgccccttgaacagtatattagtcagctcagactgctgtcacaaaaataccataagtgggtggctgaaacaacagaaatttatttctcatagttgtggaggctgagaagagacctgccagtagatctgatatcaggtgagggctgtctttctggtttgcagatgaccatcttctcactgtgtccttacatagtagataacaaagagagagagagtaagcgctctggtttctttttatgagggtgctaatcccattcatgggggctccaccctcatgacttaattacctcccagaggccctacctcctaataacatcatgttaggggttaggatttccacacgtgaattctgggtggagacaaacattcagtccccagcaagcagttctactatgatccagtcagaagatggaatgtttagctgttaaatgaagtacttgaatgacttggaagaaatgcatgtagaaaatgaaagtgttacttaatctcaacattataaaacaggcaggaagttaaatgtaaggtatctccgagttgtaagataatgggcaacctctgtctgaccttgacttcagtttcctccaagtctctcaaatgagcatcttcctcctctgaaaaaaaataataatttttctgaagtttcccctggatattggcagttgagtgcccattgactcagcttttttttagagcaaaacatgccaaaatgcagtatgagccctcatgtgaagctagggctgtgggtaaatgacttcaactttaacccttcaaataaacgtttgtagtaaagaagacgtgtgctgaatctgacttcgtgtgcaacaatggccagtgtgttcccagccgatggaagtgtgatggagatcctgactgcgaagatggttcagatgaaagcccagaacagtgccgtgagtgtaacttgctttggccttgaactttgccaagttgttcggtgtctaacatttctaagtattgcttaatctcctacttggtattcatttttctttgcctgccttaaagtttaggtcaattgactccaagggcagtcaaatcattaccagtttatcagcctcctttaaagaatgttctccctggtccaacaagactgacattctcttgggtagcttcactattgaatacttaaaactgaagtcagcagattcaatcaagaactccttgactaggtgcatagatttcaaatgtctgtttataataactgagcagatggtactctggtcctggaagctaagtcaagaagtgagggttccctatgggccaagcaaaagcttttagaagcacagcttatcatactattaaaaagctattactgaagaggtaaggtagctagtaattgggtgatatagtgactcctgacacacatgtaacctcaagttactaaaatggagatcttacagcatattcttaaataagagaaacttcataggtatgcaagtatatacctgtgtccttaggaaaaagtctatgagaccataaagaatgatggtttgggatcatataaattgagatcacacgaatgtcaaggcaaagaaagtcttagagtttgagtcagtagaggcctgcactggtagaaacactaaaaaaggactaacatgaacacagtttaggtctaaagtgtgattatgaaagaaaatcaaatagaaaggaagataaggctgttactttcaattttctagataagaagtgaggggagtaatattggtcaaggcaagtgagttcaaggcctgtgagctaaagacaggttgtgtaaagattcagcctcaacttttagtggagaatgacctggtcaagtcaagcattagggcatgcttctactttgcaagatgtcaatctaaaggacattgtgaaggaggcccataaaggaatctaggcaatagaagattttgtaggtgtttgaccatctgacttttcatgtatttgagattagatgacaatatctaggtgtgcccacttgacatccaacagataaatagtggtctaggagcaggccagccaataaacttcaccacgccaagtaaaacaaaagccagaactgagcacgccatgggaccttgaaggagtgacgtggtcaaagctgtcacgtacactgccaggtagcataggttggcacagcttctaaggagtggagctgatgaaagagctccccgggcttcagccagttagtagaatttcaccagtgtgccaggctactgagtcacaggtattagcgcttccaggcagcacaggagcagcagctttgcattgatcagttctgaggctcttttgagactgtatatcatcaacagatatgagaacatgccgcatacatgaaatcagctgtggcgcccattctactcagtgtatcccagtgtcctggagatgtgatggtgaaaatgattgtgacagtggagaagatgaagaaaactgtggtaagaagatcagtgttgagtgacgtaacccaaagacccttttcctaaaggaagggtgggcaggggaaactaatctaagcctgaagacgcactgacattgactcacttttcagtgacttcactatctgctcaattacttgtccttcataactgccctaaaaccctaaaagacattcatgtggcaattgaccatcgcttggtgtttcttttaggcaaatagaaataagaaggtaagtcattcaaggcacttatatatagaagtagctcagggaagcagcaattgtgtgggcttttgttttgacagtaattcatgtgtcttttgcactttggcacaataaaattagaaggtgagtagggttggcaaacacattcataggtctaaatttgattgggttattggaataaattatttgagtattatacaagcatttctttgcccatgaactagattctggcataactttcccagaaaaaaaaaaaaaaaagacacagaagcatgaattaacatcttgcctcagatacccaaagaaaagtctacccaactggtgatacctttgtctcctgttgcagttcctgtctctgaaagctaactctgcttcctattctttcatgtttctggtcttggaaaatctttaataaaatgctgcatgttgaaggtgagggcctgggaaaatcactaggttgaacaaacagtgctttgaatgttctttcaagctactgccctttttatagggcctctaaaacctacagctcccaagtctgacaagcatgggcctcctgatatggtagtagtcaagggagctcagggcacttacagttgaaacaccagtcttgtgtgtagaagtcgcctcctgaggtcaataccactgcacctagtccaatgagttttagtgttcaatcctagaattgggttttctgtattggtaagccctggtgctgccaagtgtttcccttataaatctagactttgcttcccaagagagtcgtggtctctattctaattgccaccaaattgtgaccttgaaacatttggcaggaatttaagtcaaagtaccaattggctagtaggactagcttatcattgtcagcatacctgattgttaaatggtgattatagccctggcagtgactttttcaaaatggaaagtgtttaagacttgttattcctgatccttatttaaaggaccaaaaagaggaaccatatatggtggtatgtggttcacctcttttggtgacaaagtcttaatgcttgttgtgagtattacgttgcatgatattctcaactagtgataagatctgacaagcagtatgttgattcaaggacaactcaatctctgccttccaaattgaaatcccttgttacagtttgttatttatgatggccacttttagaatcaattgtggttctcatctcaaattaatttccagtcttcaactattttcttggttctttatttctgttcttcttatttattgtgtgccttcattttttgtacaatgagactgtacaaaagttcttgatttaactccattgtagcctttaagttgggctagtaagttaggattaatgaataaagatcaatgtattagattttgggacaagaatcttgaacggaccaatcttgatgcattttcagtggggcatcctctctcttaataggcaatataacatgtagtcccgacgagttcacctgctccagtggccgctgcatctccaggaactttgtatgcaatggccaggatgactgcagcgatggcagtgatgagctggactgtgccccgccaacctgtggcgcccatgagttccagtgcagcacctcctcctgcatccccatcagctgggtatgcgacgatgatgcagactgctccgaccaatctgatgagtccctggagcagtgtggccgtcagccagtcatacacaccaagtgtccagccagcgaaatccagtgcggctctggcgagtgcatccataagaagtggcgatgtgatggggaccctgactgcaaggatggcagtgatgaggtcaactgtcgtaagtagctttctagcatggcatgttcagttctcttccctgtatcaactgggacaatttgctggcttcattccatggtgtttcctccctttgtagcctctcgaacttgccgacctgaccaatttgaatgtgaggatggcagctgcatccatggcagcaggcagtgtaatggtatccgagactgtgtcgatggttccgatgaagtcaactgcaaaaatggtaagggtttcttcttgttggttaagcaatggattgctctgaccagacccactcatggaatctctcttctttgtttctctttgtagtcaatcagtgcttgggccctggaaaattcaagtgcagaagtggagaatgcatagatatcagcaaagtatgtaaccaggagcaggactgcagggactggagtgatgagcccctgaaagagtgtcgtaagtgtacttgttgttcaagtacagatcctggaagtttgacacaatccagtatagctaacactgtgtggaccccccgtgatggctagttaaacttttgaatgtactgaagttcaattgtagacttcagagtgaaactttatgacttaaaagcccaggtaggacaaactagtttatagtttttgtttttgttgttttttttttttttttttttttgagatggagttccactcttgttgcccaggctggagtgcaatgatgcaatctcggctcactgcaacctctgcctcccgggttcaagcagttcttctgcctcagcctcctgagtagctgggactataggcgcccaccaccacgcccggctaatttttttttttttttttgtatttttagtagagacagggtttcaccatgttggccaggctggtctcgaactcctgacctcgtgatccacccgcctcggccttccaaagtgctgggattacaggcatgagccaccgcgcccggcccaaactagtttatagtttaacctccttaaagataactgatcatcaatagagaaacttgactaaatgcttgaccagctggtaacttgccgaggagttagataatccaccctgaaatatatacctataaaataaatgattaggtcttagacaaatcgtgggtttgaccaggccaactagataagttatcacaaatagcctgggttttaaatgtgaaagatattaattgaaaataagttgtcaagtgactactacatttttattccagatataaacgaatgcttggtaaataatggtggatgttctcatatctgcaaagacctagttataggctacgagtgtgactgtgcagctgggtttgaactgatagataggaaaacctgtggaggtgagtctaagaagaaaacctggaccctgcaggtgatgggaaaggatagtatgtacctagtaaggtataggagcagcaagactaattctgatttccctcccagatattgatgaatgccaaaatccaggaatctgcagtcaaatttgtatcaacttaaaaggcggttacaagtgtgaatgtagtcgtggctatcaaatggatcttgctactggcgtgtgcaaggcagtaggtaaatgaacttggactggtatggctgttgtacctttatgagtaagtgcctctaaaaggtacagccagtgactacaatagtcaaactaaacatgaaattgtacttgagaacaatgctgctaacctcataatacagcagtataggtcaaatagcagatctctcccctagatatgtaccttgatcattccttttgcatatgataccatgaatacctaccaggtttgcatgctctgtttccaaaacttgagtccaactcaaacaagtgacttattcatcactcaccctgttcttgaaggctgtaaccccacgactgccttcctaaactgtaggaagcacttgcaggtcccaggggcaggaactccagaacagatactactgaggtattccacaatacctttattttctaagtgctcctctgctgggaggaggtggtttagaaagaccttgccttcttaaagcaaaactaagtaacccagacttccatcttgcaggcaaagagccaagtctgatcttcactaatcgaagagacatcaggaagattggcttagagaggaaagaatatatccaactagttgaacagctaagaaacactgtggctctcgatgctgacattgctgcccagaaactattctgggccgatctaagccaaaaggctatcttcaggtaactttcagttccttttgtggtgtcttgacataagtcattgtcacttgggaagtgatctgtgggatagtttggaggagtttcttttgtgtctagccccatctagcatcgaattacctggggacattaaatctaatgctaattctttattaaactgttatcacttcctaattagaaactaacaattgtctatgaagtaaaagatgacatctttcatattttttatattttctcccttttctctacagttaattgagaactgttcattgttgctacaaatagaaatggtagtacagccttttcttaatgggaactatagaaactcagatgatggatactgaaacaaatagcttcacttagaaatttgttgttcttgtatatagaatacataccagcaactagataatctacagcattattaatttaggatcagtaagcagcatggttaaataatttgagtggtgagctgtggtgttaactggatttctttctgaacaaagtcattgaccattttgtaagcaaaaagtccattctccaagctctaattgtgtcaaactcttaaatttcttgtgacctattctgtttcagtgcctcaattgatgacaaggttggtagacatgttaaaatgatcgacaatgtctataatcctgcagccattgctgttgattgggtgtacaagaccatctactggactgatgcggcttctaagactatttcagtagctaccctagatggaaccaagaggaagttcctgtttaactctgacttgcgagagcctgcctccatagctgtggacccactgtctgggtttgtagtctgttttccatcacagactttggaatggtatctgtgtaggtcaggagctttctcatacctgaattagtactcaaatctcaaggtttatgagccttctgcaacaaagaattagaattctaatttaagatatcagttttgccccaggtgagtgaccctgggatgtccttatctatatgacaggtcctcctgtctgactctcgtatgactgattgctggctgacattaatgaattaacattcctgatttgatgtgtgtaccaaaagctgtatctgaacccttttgtccacccagtttctacgcaagtgattttttaatttttgactgaaagctttgctgggctagctctggatgatcaaacctaaacgacagcctgaattgtgaggatttgggtaaccacattgcatctaagtgtgcaagttgtctgaaagtccagcagaaataaacagacctttctagaaacatttcactaagggggttctgtaaattgccactaagtaacatagaagagcagctcaggaagttgactaaggctgtagttgtcatcacaactggcccccgtgcagcctcattagaactcagtcagccagccaacccctgctatgaaatttgaaggatgttcgtcttgcactcctctgtaagaactgaccttttaaaaaggaaacataaccttgtgactttgggccgaaatttaaatgtcagacaaacatagattattatagttaataatgagcttgtagattcttaatattcaattttatttacctagaacataatttagacccttaagtgttactatttgtcactagagaatgccttgagttttctgctcaaattttaaatttttgtttccagctactacaactttattccttctaaaccactgaggcttatttctcatttaatttttcacagctttgtttactggtcagactggggtgaaccagctaaaatagaaaaagcaggaatgaatggattcgatagacgtccactggtgacagcggatatccagtggcctaacggaattacacttggtatgtatgttcttccttctcgaccacccactcaactatcttcatagtgtttccatttatctccatggtgaattctggactagcagatgactctactgcttccgcctaaattctagcaggaattttcaatgggagtaactgaacaacacaagtaaaatggtggattaacaaattacacattccataattactggcctgttgtccagctgggcctaatatgtgacacaaattcagtgaacgttgggtcttgggtgcactcatactaaatattctgggcatgagtgccttagcatttcctgaattgcaggcttttaacagttttcttctggctttttggaggagaacaacaaaatggtagcctcttttaatattttctgtaatgtgagtaatatttcttaagtcatttgctttgagaatctcaggtaccctgttagtccccaaaaatgaacgtggatacaggctctgcatgctgcttcgcaaggtttatggtgaccccgttaagaaaccctgctggggaaagaaccgtgaaagtagattattaattcattagatatttttaatggaagccagagtagtagtggcttgtcatgtaatgacaattcttttcctacctagaccttataaaaagtcgcctctattggcttgattctaagttgcacatgttatccagcgtggacttgaatggccaagatcgtaggatagtactaaagtctctggagttcctagctcatcctcttgcactaacaatatttgaggtaagatgtgtctcacatcaaagtgtgtacctttgagctactatatcactttgagaagaaataacagacatagcgggaggagggaagagcagctgaacatggcttgagaaactgctttcacttaaaacctggtacaaatcagacactaagtcccagaagcactccacacctaaacttgattcttttacagttttatatccagtgtcccagttcagcattcagtaaacttagtccattaaatgagaagtaaatgatgatgaccttagaaatggacttgtgttaatcctggatgtacatgctaattgtgggcttctgttttaggatcgtgtctactggatagatggggaaaatgaagcagtctatggtgccaataaattcactggatcagagctagccactctagtcaacaacctgaatgatgcccaagacatcattgtctatcatgaacttgtacagccatcaggtaccgtggagaagcacagtccttaataactactttaagggaagcagcatgacacagaacctgctggatgtcagtagctcttggcaactcagttttctttaaaagggaacttttgccctcctgtaccctaccttaaacatttcacatgttatttttttatttctgctgcctcagagaaatggcttctcaacttcagctcctggctttcctcccaagcctcagtgtcagagcttttatttctgtttcattcatgtccccttggccttcagcccctcttgccaagactattgcagtagcctccaaagtagcttttgtgctacaagctttctctactgttagtttgctaggatttttgcaatgaagtaccacagactatcttaaacaacagaaatttattgtctcaaaactctggaggccagaagtttgaaatcaaggtgccaggagggttggtgcctcttgagggctgtgagggaagggtctgttccaggcctcttcttggtctgttgatggtgctcttccccctttgtctcttcacatcatcgtccctctgtatatgctcgtgtccagctttcttgctttctttctttttctgttttttggagactgactcttgctctgtcacccaggctggagtgcagtggcacaatctcggctcactgcaacctccgcctcctgtgttcaagcaattctcctgcctcagcctcccgagtagctgggactacaggagtgagccaccacgtccagctaaactttgtatctttagtagagatggggtttcaccatgttggccagactggtctcgaactcctgacccaaagtaatctgcctgcctcggcctcctaaagtgccggaattacaggcgtgagctgtaataacagtcatattggattagagcccaccttaatgacctcattttaacttgattacctctgtaaatatcctatcctcaatatctccaaataagatcacattctgaggtactaggacttcattatatgaattttagggaggaacaccattcaactcataacacctactttccccctgtgacacacctgatataggattgtgtagattctcaaacacatcgggttatattatctcctgctgaaaacacttggctggttctatctaaataaagccttcaaaccttcctaaggctgagtttccttccactttgttggagcaagtcaagagaaaaccaggagaacatgcctagtctcctttctctgagccttcacgctaaacctcgggcaaatagtgagagccagtcctggtccctcacctcccttccccacctcctcttttggcatctgtctcttaaaggcataacttttacagtctatctcgaagaggtcccttatctggtgtccttagagcatgctgcctgtacctgtatacttattcttccttgatactgttctcacttgaaggattagcagagtagacaagtttaagctcttgggggcaaggactcaggtcttcaacatgtagaacaaggctttatatatactaggcaccggaatacccattttaatggtattttttttcctgactaggtaaaaattggtgtgaagaagacatggagaatggaggatgtgaatacctatgcctgccagcaccacagattaatgatcactctccaaaatatacctgttcctgtcccagtgggtacaatgtagaggaaaatggccgagactgtcaaagtaaggcattttgtgtttcaaccacaagtagaacctacaacaagcaatataataagacacaagcttggatttttaagaattctgtcttagctaattctttgaatagatttgagaagatatctgctattgtatgccgggttatcatgtcatttctttagaactgactttaacccatttcaacattaaatgagtttataggagactaaagtgtcaacataccttacactaatttgtacctagtcccttaacagcactgagctagccaacttgcaggtaattaaatgaggccttaacatttttcctcaaaaggaggaggacagaaattatgcttaaggaaggccatggttacagaaacctcattgcctcagtgggtgacgctaccctaaaataacacttaggctgaatttgcatttagtcttctgttcttaacttttgattaagtggcaaattaaagtcatttgtgtgatcaaggagcttgtatggtgaggctgatgaggtttttattagcgtaattcatggtcaggcagggattagctcagtttaccaagaaattagttgcaagacagtctggtatgcctggtataccagagcatcttgagaacatttctcgtagtttccaggaacatgggatgttgtttagagggataaaatgtggttgtccatcattttgaattgtcaaattccaaacaccgactgtccttcccaaagtttcatgtatctcttttttgcatgaagattgctatttcaatgttgacacatcagctgtacaacttagttcagcagtggtttgtctattttacctggttttaaaataaccttttacatggcttgtctggacaaaacagctagccatgctggaaccctggcattaaccaggttcttggtttttataattcaggtactgcaactactgtgacttacagtgagacaaaagatacgaacacaacagaaatttcagcaactagtggactagttcctggaggtattgagttcagtactgcaaactgttaatctcaactaacagccacactctttgtatctacagcttaaataattaatgcagcctttaactactatttctgccccaattggtaacctatatttaaacaccaaagacttaaaacttgcatatcttttcctgactgatcttaaaggtttctagtagagaactgtcagtgaaatggctactacagcatgtgactcaaatacttctaagccagagttgttcctggtgttcaattgttgtagatactgaacatcaatattggatgcaaaggttttggctccttacctgatgggtaaatttctaagtctgaatacagatccttctaaactgattccttttattcctctgtagggatcaatgtgaccacagcagtatcagaggtcagtgttcccccaaaagggacttctgccgcatgggccattcttcctctctgtaagtagatttcctacaagtctgggttcaagaacttcttagataccagatgaagattttttgttcatctggagctacccctttcatgggcctttatgctgtctagcatttatgacactgaattacgttcgctttctcccccacataatacactaaattaaggcccatatctttctcttcagttgtacctttggcacagtaactggcaatgataagtgttcaacggttaatgctttctacttccgcactgttaacctggcttatccccttttataataagtctctttaactagtgtactgttctgttccccctttgaaatgtgtgtaatgcttcatacagaggagatgcacaaatgcttaaatgctaagagttacaggacttgttgaggataaattaaaagcagttaagaattttcaaacctatggaaaaggacctctaaacgagacacgcaaattctaaggactttgctataaaaacctttgtcctaaatgaagagacccaagcttagctaacacgccaggaccacctgaatagctctccagaaccttctgcaattttaatttggtgagcctaaggtgggaccgaggaccctgcccttgcctggatggatgtggctagtccagctccagtgcacagagctacctctgggctgaacttgtttcaagctcctggcccatgtgtattccaacttctagttatcctagctccataaaacatggcatttttactaatgtcaattattatggattcctgaacgttattacctttcttgtatgttccaatactagacttagctcacttagctaccctctgatttttttcagtgctcttagtgatggcagcagtaggtggctacttgatgtggcggaattggcaacacaagaacatgaaaagcatgaactttgacaatcctgtgtacttgaaaaccactgaagaggacctctccatagacattggtagacacagtgcttctgttggacacacgtacccagcagtaagtcagctttgtgtctttatacaccatggcttgaagtgagacttttcagaaaggagacctgggtgagagagagagagccattaggatgatggagttaccaaacacttcatctgctacctggctattagacagacagtatagcctgttagaacataagtcactcagttgatcagcatctaaccctcaccaactgacaagtgggtcaacttaaagtcaccactatattaagatatttttggttatagaaatgacatgtaaatactagcatgaaccaagtagctcattactgaactattaaatccattgcctactggatatttgaaagtaaattagcatatcatatataggggagttggcttaaagtcagtgtattgagtaagattcacttagccaaaattattatatgctttgctttaaaaaggtatcccaccgcccttagtatagctagcttttcttccagcaatagtcactcacttgttcttcagatgaaacccaagtggagtatttggccttcacgtaggaaacaggctgaacaaaacaagtattgatcactcccctctcaaactccggtgaaacatggaacagtggtcaattcttgacacacacatggcttttcacatttttccccaagacttatgatcattaagtagaaaagacagaattagtcacactatcttatctcactaccaagcaggtatagttgaattcaagttaaatgcatgaatgatacaactcagtattcttttgtatctgactgacttttcttctaagcactctgagtgtttgaatgaccaactcaaaagcaaggtccattttaaagactagagttgccatcagtgagtgatcaccaagctcattctatacttcttcttttccacagatatcagttgtaagcacagatgatgatctagcttgacttctgtgacaaatgttgacctttgaggtctaaacaaataatacccccgtcggaatggtaaccgagccagcagctgaagtctctttttcttcctctcggctggaagaacatcaagatacctttgcgtggatcaagcttgtgtacttgaccgtttttatattacttttgtaaatattcttgtccacattctacttcagctttggatgtggttaccgagtatctgtaacccttgaatttctagacagtattgccacctctggccaaatatgcactttccctagaaagccatattccagcagtgaaacttgtgctatagtgtataccacctgtacatacattgtataggccatctgtaaatatcccagagaacaatcactattcttaagcactttgaaaatatttctatgtaaattattgtaaactttttcaatggttgggacaatggcaataggacaaaacgggttactaagatgaaattgccaaaaaaatttataaactaattttgtacgtatgaatgatatctttgacctcaatggaggtttgcaaagactgagtgttcaaactactgtacattttttttcaagtgctaaaaaattaaaccaagcagcttaaccatggtttgtgcctgttcctctaggatgaactcctatcctgagtagtaccaagtgttctaactaaatgtgtgagctgtagttcttgatgttgtataactaagcctgtaattgggctggtttctcttacaccctagcacagttaaaaaatgaagtactgtttaacatttgctcccgaaatatttcttactgtgtaaaagaagctagcttagtctgtacctagaattcctcttggttagaggagtgagtttcttttttttccattaacttgtttcctgatcgagaaa

SEQ ID NO: 43 - DNA, 3374 bp, Homo sapiens
ctcaccccgctctccggccgccgccggtgcgggtgctccgctaccggctcctctccgttctgtgctctcttctgctctcggctccccaccccctctcccttccctcctctccccttgcctcccctcctctgcagcgcctgcattattttctgcccgcaggctcggcttgcactgctgctgcagcccggggaggtggctgggtgggtggggaggagactgtgcaagttgtaggggagggggtgccctcttcttccccgctcccttcccccgccaactccttcccctccttctccccctttcccctccccgcccccaccttcttcctcctttcggaaggactggtaacttgtcgtgcggagcgaacggcggcggcggcggcggcggcggcaccatccaggcgggcaccatgggcacgtccgcgctctgggcgctctggctgctgctcgcgctgtgctgggcgccccgggagagcggcgccaccggaaccgggagaaaagccaaatgtgaaccctcccaattccagtgcacaaatggtcgctgtattacgctgttgtggaaatgtgatggggatgaagactgtgttgacggcagtgatgaaaagaactgtgtaaagaagacgtgtgctgaatctgacttcgtgtgcaacaatggccagtgtgttcccagccgatggaagtgtgatggagatcctgactgcgaagatggttcagatgaaagcccagaacagtgccatatgagaacatgccgcatacatgaaatcagctgtggcgcccattctactcagtgtatcccagtgtcctggagatgtgatggtgaaaatgattgtgacagtggagaagatgaagaaaactgtggcaatataacatgtagtcccgacgagttcacctgctccagtggccgctgcatctccaggaactttgtatgcaatggccaggatgactgcagcgatggcagtgatgagctggactgtgccccgccaacctgtggcgcccatgagttccagtgcagcacctcctcctgcatccccatcagctgggtatgcgacgatgatgcagactgctccgaccaatctgatgagtccctggagcagtgtggccgtcagccagtcatacacaccaagtgtccagccagcgaaatccagtgcggctctggcgagtgcatccataagaagtggcgatgtgatggggaccctgactgcaaggatggcagtgatgaggtcaactgtccctctcgaacttgccgacctgaccaatttgaatgtgaggatggcagctgcatccatggcagcaggcagtgtaatggtatccgagactgtgtcgatggttccgatgaagtcaactgcaaaaatgtcaatcagtgcttgggccctggaaaattcaagtgcagaagtggagaatgcatagatatcagcaaagtatgtaaccaggagcaggactgcagggactggagtgatgagcccctgaaagagtgtcatataaacgaatgcttggtaaataatggtggatgttctcatatctgcaaagacctagttataggctacgagtgtgactgtgcagctgggtttgaactgatagataggaaaacctgtggagatattgatgaatgccaaaatccaggaatctgcagtcaaatttgtatcaacttaaaaggcggttacaagtgtgaatgtagtcgtggctatcaaatggatcttgctactggcgtgtgcaaggcagtaggcaaagagccaagtctgatcttcactaatcgaagagacatcaggaagattggcttagagaggaaagaatatatccaactagttgaacagctaagaaacactgtggctctcgatgctgacattgctgcccagaaactattctgggccgatctaagccaaaaggctatcttcagtgcctcaattgatgacaaggttggtagacatgttaaaatgatcgacaatgtctataatcctgcagccattgctgttgattgggtgtacaagaccatctactggactgatgcggcttctaagactatttcagtagctaccctagatggaaccaagaggaagttcctgtttaactctgacttgcgagagcctgcctccatagctgtggacccactgtctggctttgtttactggtcagactggggtgaaccagctaaaatagaaaaagcaggaatgaatggattcgatagacgtccactggtgacagcggatatccagtggcctaacggaattacacttgaccttataaaaagtcgcctctattggcttgattctaagttgcacatgttatccagcgtggacttgaatggccaagatcgtaggatagtactaaagtctctggagttcctagctcatcctcttgcactaacaatatttgaggatcgtgtctactggatagatggggaaaatgaagcagtctatggtgccaataaattcactggatcagagctagccactctagtcaacaacctgaatgatgcccaagacatcattgtctatcatgaacttgtacagccatcaggtaaaaattggtgtgaagaagacatggagaatggaggatgtgaatacctatgcctgccagcaccacagattaatgatcactctccaaaatatacctgttcctgtcccagtgggtacaatgtagaggaaaatggccgagactgtcaaaggatcaatgtgaccacagcagtatcagaggtcagtgttcccccaaaagggacttctgccgcatgggccattcttcctctcttgctcttagtgatggcagcagtaggtggctacttgatgtggcggaattggcaacacaagaacatgaaaagcatgaactttgacaatcctgtgtacttgaaaaccactgaagaggacctctccatagacattggtagacacagtgcttctgttggacacacgtacccagcaatatcagttgtaagcacagatgatgatctagcttgacttctgtgacaaatgttgacctttgaggtctaaacaaataatacccccgtcggaatggtaaccgagccagcagctgaagtctctttttcttcctctcggctggaagaacatcaagatacctttgcgtggatcaagcttgtgtacttgaccgtttttatattacttttgtaaatattcttgtccacattctacttcagctttggatgtggttaccgagtatctgtaacccttgaatttctagacagtattgccacctctggccaaatatgcactttccctagaaagccatattccagcagtgaaacttgtgctatagtgtataccacctgtacatacattgtataggccatctgtaaatatcccggacaaaacgggttactaagatgaaattgccaaaaaaatttataaactaattttgtacgtatgaatg

SEQ ID NO: 44 - protein, 843 aa, Homo sapiens
MGTSALWALWLLLALCWAPRESGATGTGRKAKCEPSQFQCTNGRCITLLWKCDGDEDCVDGSDEKNCVKKTCAESDFVCNNGQCVPSRWKCDGDPDCEDGSDESPEQCHMRTCRIHEISCGAHSTQCIPVSWRCDGENDCDSGEDEENCGNITCSPDEFTCSSGRCISRNFVCNGQDDCSDGSDELDCAPPTCGAHEFQCSTSSCIPISWVCDDDADCSDQSDESLEQCGRQPVIHTKCPASEIQCGSGECIHKKWRCDGDPDCKDGSDEVNCPSRTCRPDQFECEDGSCIHGSRQCNGIRDCVDGSDEVNCKNVNQCLGPGKFKCRSGECIDISKVCNQEQDCRDWSDEPLKECHINECLVNNGGCSHICKDLVIGYECDCAAGFELIDRKTCGDIDECQNPGICSQICINLKGGYKCECSRGYQMDLATGVCKAVGKEPSLIFTNRRDIRKIGLERKEYIQLVEQLRNTVDADIAAQKLFWADLSQKAIFSASIDDKVGRHVKMIDNVYNPAAIAVDWVYKTIYWTDAASKTISVATLDGTKRKFLFNSDLREPASIAVDPLSGFVYWSDWGEPAKIEKAGMNGFDRRPLVTADIQWPNGITLDLIKSRLYWLDSKLHMLSSVDLNGQDRRIVLKSLEFLAHPLALTIFEDRVYWIDGENEAVYGANKFTGSELATLVNNLNDAQDIIVYHELVQPSGKNWCEEDMENGGCEYLCLPAPQINDHSPKYTCSCPSGYNVEENGRDCQRINVTTAVSEVSVPPKGTSAAWAILPLLLLVMAAVGGYLMWRNWQHKNMKSMNFDNPVYLKTTEEDLSIDIGRHSASVGHTYPAISVVSTDDDLA

SEQ ID NO: 45 - DNA, 3458 bp, Homo sapiens
ctcaccccgctctccggccgccgccggtgcgggtgctccgctaccggctcctctccgttctgtgctctcttctgctctcggctccccaccccctctcccttccctcctctccccttgcctcccctcctctgcagcgcctgcattattttctgcccgcaggctcggcttgcactgctgctgcagcccggggaggtggctgggtgggtggggaggagactgtgcaagttgtaggggagggggtgccctcttcttccccgctcccttcccccgccaactccttcccctccttctccccctttcccctccccgcccccaccttcttcctcctttcggaaggactggtaacttgtcgtgcggagcgaacggcggcggcggcggcggcggcggcaccatccaggcgggcaccatgggcacgtccgcgctctgggcgctctggctgctgctcgcgctgtgctgggcgccccgggagagcggcgccaccggaaccgggagaaaagccaaatgtgaaccctcccaattccagtgcacaaatggtcgctgtattacgctgttgtggaaatgtgatggggatgaagactgtgttgacggcagtgatgaaaagaactgtgtaaagaagacgtgtgctgaatctgacttcgtgtgcaacaatggccagtgtgttcccagccgatggaagtgtgatggagatcctgactgcgaagatggttcagatgaaagcccagaacagtgccatatgagaacatgccgcatacatgaaatcagctgtggcgcccattctactcagtgtatcccagtgtcctggagatgtgatggtgaaaatgattgtgacagtggagaagatgaagaaaactgtggcaatataacatgtagtcccgacgagttcacctgctccagtggccgctgcatctccaggaactttgtatgcaatggccaggatgactgcagcgatggcagtgatgagctggactgtgccccgccaacctgtggcgcccatgagttccagtgcagcacctcctcctgcatccccatcagctgggtatgcgacgatgatgcagactgctccgaccaatctgatgagtccctggagcagtgtggccgtcagccagtcatacacaccaagtgtccagccagcgaaatccagtgcggctctggcgagtgcatccataagaagtggcgatgtgatggggaccctgactgcaaggatggcagtgatgaggtcaactgtccctctcgaacttgccgacctgaccaatttgaatgtgaggatggcagctgcatccatggcagcaggcagtgtaatggtatccgagactgtgtcgatggttccgatgaagtcaactgcaaaaatgtcaatcagtgcttgggccctggaaaattcaagtgcagaagtggagaatgcatagatatcagcaaagtatgtaaccaggagcaggactgcagggactggagtgatgagcccctgaaagagtgtcatataaacgaatgcttggtaaataatggtggatgttctcatatctgcaaagacctagttataggctacgagtgtgactgtgcagctgggtttgaactgatagataggaaaacctgtggagatattgatgaatgccaaaatccaggaatctgcagtcaaatttgtatcaacttaaaaggcggttacaagtgtgaatgtagtcgtggctatcaaatggatcttgctactggcgtgtgcaaggcagtaggcaaagagccaagtctgatcttcactaatcgaagagacatcaggaagattggcttagagaggaaagaatatatccaactagttgaacagctaagaaacactgtggctctcgatgctgacattgctgcccagaaactattctgggccgatctaagccaaaaggctatcttcagtgcctcaattgatgacaaggttggtagacatgttaaaatgatcgacaatgtctataatcctgcagccattgctgttgattgggtgtacaagaccatctactggactgatgcggcttctaagactatttcagtagctaccctagatggaaccaagaggaagttcctgtttaactctgacttgcgagagcctgcctccatagctgtggacccactgtctggctttgtttactggtcagactggggtgaaccagctaaaatagaaaaagcaggaatgaatggattcgatagacgtccactggtgacagcggatatccagtggcctaacggaattacacttgaccttataaaaagtcgcctctattggcttgattctaagttgcacatgttatccagcgtggacttgaatggccaagatcgtaggatagtactaaagtctctggagttcctagctcatcctcttgcactaacaatatttgaggatcgtgtctactggatagatggggaaaatgaagcagtctatggtgccaataaattcactggatcagagctagccactctagtcaacaacctgaatgatgcccaagacatcattgtctatcatgaacttgtacagccatcaggtaaaaattggtgtgaagaagacatggagaatggaggatgtgaatacctatgcctgccagcaccacagattaatgatcactctccaaaatatacctgttcctgtcccagtgggtacaatgtagaggaaaatggccgagactgtcaaagtactgcaactactgtgacttacagtgagacaaaagatacgaacacaacagaaatttcagcaactagtggactagttcctggagggatcaatgtgaccacagcagtatcagaggtcagtgttcccccaaaagggacttctgccgcatgggccattcttcctctcttgctcttagtgatggcagcagtaggtggctacttgatgtggcggaattggcaacacaagaacatgaaaagcatgaactttgacaatcctgtgtacttgaaaaccactgaagaggacctctccatagacattggtagacacagtgcttctgttggacacacgtacccagcaatatcagttgtaagcacagatgatgatctagcttgacttctgtgacaaatgttgacctttgaggtctaaacaaataatacccccgtcggaatggtaaccgagccagcagctgaagtctctttttcttcctctcggctggaagaacatcaagatacctttgcgtggatcaagcttgtgtacttgaccgtttttatattacttttgtaaatattcttgtccacattctacttcagctttggatgtggttaccgagtatctgtaacccttgaatttctagacagtattgccacctctggccaaatatgcactttccctagaaagccatattccagcagtgaaacttgtgctatagtgtataccacctgtacatacattgtataggccatctgtaaatatcccggacaaaacgggttactaagatgaaattgccaaaaaaatttataaactaattttgtacgtatgaatg

SEQ ID NO: 46 - protein, 871 aa, Homo sapiens
MGTSALWALWLLLALCWAPRESGATGTGRKAKCEPSQFQCTNGRCITLLWKCDGDEDCVDGSDEKNCVKKTCAESDFVCNNGQCVPSRWKCDGDPDCEDGSDESPEQCHMRTCRIHEISCGAHSTQCIPVSWRCDGENDCDSGEDEENCGNITCSPDEFTCSSGRCISRNFVCNGQDDCSDGSDELDCAPPTCGAHEFQCSTSSCIPISWVCDDDADCSDQSDESLEQCGRQPVIHTKCPASEIQCGSGECIHKKWRCDGDPDCKDGSDEVNCPSRTCRPDQFECEDGSCIHGSRQCNGIRDCVDGSDEVNCKNVNQCLGPGKFKCRSGECIDISKVCNQEQDCRDWSDEPLKECHINECLVNNGGCSHICKDLVIGYECDCAAGFELIDRKTCGDIDECQNPGICSQICINLKGGYKCECSRGYQMDLATGVCKAVGKEPSLIFTNRRDIRKIGLERKEYIQLVEQLRNTVDADIAAQKLFWADLSQKAIFSASIDDKVGRHVKMIDNVYNPAAIAVDWVYKTIYWTDAASKTISVATLDGTKRKFLFNSDLREPASIAVDPLSGFVYWSDWGEPAKIEKAGMNGFDRRPLVTADIQWPNGITLDLIKSRLYWLDSKLHMLSSVDLNGQDRRIVLKSLEFLAHPLALTIFEDRVYWIDGENEAVYGANKFTGSELATLVNNLNDAQDIIVYHELVQPSGKNWCEEDMENGGCEYLCLPAPQINDHSPKYTCSCPSGYNVEENGRDCQSTATTVTYSETKDTNTTEISATSGLVPGGINVTTAVSEVSVPPKGTSAAWAILPLLLLVMAAVGGYLMWRNWQHKNMKSMNFDNPVYLKTTEEDLSIDIGRHSASVGHTYPAISVVSTDDDLA

SEQ ID NO: 47 - DNA, 3842 bp, Homo sapiens
ctcaccccgctctccggccgccgccggtgcgggtgctccgctaccggctcctctccgttctgtgctctcttctgctctcggctccccaccccctctcccttccctcctctccccttgcctcccctcctctgcagcgcctgcattattttctgcccgcaggctcggcttgcactgctgctgcagcccggggaggtggctgggtgggtggggaggagactgtgcaagttgtaggggagggggtgccctcttcttccccgctcccttcccccgccaactccttcccctccttctccccctttcccctccccgcccccaccttcttcctcctttcggaaggactggtaacttgtcgtgcggagcgaacggcggcggcggcggcggcggcggcaccatccaggcgggcaccatgggcacgtccgcgctctgggcgctctggctgctgctcgcgctgtgctgggcgccccgggagagcggcgccaccggaaccgggagaaaagccaaatgtgaaccctcccaattccagtgcacaaatggtcgctgtattacgctgttgtggaaatgtgatggggatgaagactgtgttgacggcagtgatgaaaagaactgtgtaaagaagacgtgtgctgaatctgacttcgtgtgcaacaatggccagtgtgttcccagccgatggaagtgtgatggagatcctgactgcgaagatggttcagatgaaagcccagaacagtgccatatgagaacatgccgcatacatgaaatcagctgtggcgcccattctactcagtgtatcccagtgtcctggagatgtgatggtgaaaatgattgtgacagtggagaagatgaagaaaactgtggcaatataacatgtagtcccgacgagttcacctgctccagtggccgctgcatctccaggaactttgtatgcaatggccaggatgactgcagcgatggcagtgatgagctggactgtgccccgccaacctgtggcgcccatgagttccagtgcagcacctcctcctgcatccccatcagctgggtatgcgacgatgatgcagactgctccgaccaatctgatgagtccctggagcagtgtggccgtcagccagtcatacacaccaagtgtccagccagcgaaatccagtgcggctctggcgagtgcatccataagaagtggcgatgtgatggggaccctgactgcaaggatggcagtgatgaggtcaactgtccctctcgaacttgccgacctgaccaatttgaatgtgaggatggcagctgcatccatggcagcaggcagtgtaatggtatccgagactgtgtcgatggttccgatgaagtcaactgcaaaaatgtcaatcagtgcttgggccctggaaaattcaagtgcagaagtggagaatgcatagatatcagcaaagtatgtaaccaggagcaggactgcagggactggagtgatgagcccctgaaagagtgtcatataaacgaatgcttggtaaataatggtggatgttctcatatctgcaaagacctagttataggctacgagtgtgactgtgcagctgggtttgaactgatagataggaaaacctgtggagatattgatgaatgccaaaatccaggaatctgcagtcaaatttgtatcaacttaaaaggcggttacaagtgtgaatgtagtcgtggctatcaaatggatcttgctactggcgtgtgcaaggcagtaggcaaagagccaagtctgatcttcactaatcgaagagacatcaggaagattggcttagagaggaaagaatatatccaactagttgaacagctaagaaacactgtggctctcgatgctgacattgctgcccagaaactattctgggccgatctaagccaaaaggctatcttcagtgcctcaattgatgacaaggttggtagacatgttaaaatgatcgacaatgtctataatcctgcagccattgctgttgattgggtgtacaagaccatctactggactgatgcggcttctaagactatttcagtagctaccctagatggaaccaagaggaagttcctgtttaactctgacttgcgagagcctgcctccatagctgtggacccactgtctggctttgtttactggtcagactggggtgaaccagctaaaatagaaaaagcaggaatgaatggattcgatagacgtccactggtgacagcggatatccagtggcctaacggaattacacttgaccttataaaaagtcgcctctattggcttgattctaagttgcacatgttatccagcgtggacttgaatggccaagatcgtaggatagtactaaagtctctggagttcctagctcatcctcttgcactaacaatatttgaggatcgtgtctactggatagatggggaaaatgaagcagtctatggtgccaataaattcactggatcagagctagccactctagtcaacaacctgaatgatgcccaagacatcattgtctatcatgaacttgtacagccatcaggtaaaaattggtgtgaagaagacatggagaatggaggatgtgaatacctatgcctgccagcaccacagattaatgatcactctccaaaatatacctgttcctgtcccagtgggtacaatgtagaggaaaatggccgagactgtcaaaggatcaatgtgaccacagcagtatcagaggtcagtgttcccccaaaagggacttctgccgcatgggccattcttcctctcttgctcttagtgatggcagcagtaggtggctacttgatgtggcggaattggcaacacaagaacatgaaaagcatgaactttgacaatcctgtgtacttgaaaaccactgaagaggacctctccatagacattggtagacacagtgcttctgttggacacacgtacccagcaatatcagttgtaagcacagatgatgatctagcttgacttctgtgacaaatgttgacctttgaggtctaaacaaataatacccccgtcggaatggtaaccgagccagcagctgaagtctctttttcttcctctcggctggaagaacatcaagatacctttgcgtggatcaagcttgtgtacttgaccgtttttatattacttttgtaaatattcttgtccacattctacttcagctttggatgtggttaccgagtatctgtaacccttgaatttctagacagtattgccacctctggccaaatatgcactttccctagaaagccatattccagcagtgaaacttgtgctatagtgtataccacctgtacatacattgtataggccatctgtaaatatcccagagaacaatcactattcttaagcactttgaaaatatttctatgtaaattattgtaaactttttcaatggttgggacaatggcaataggacaaaacgggttactaagatgaaattgccaaaaaaatttataaactaattttgtacgtatgaatgatatctttgacctcaatggaggtttgcaaagactgagtgttcaaactactgtacattttttttcaagtgctaaaaaattaaaccaagcagcttaaccatggtttgtgcctgttcctctaggatgaactcctatcctgagtagtaccaagtgttctaactaaatgtgtgagctgtagttcttgatgttgtataactaagcctgtaattgggctggtttctcttacaccctagcacagttaaaaaatgaagtactgtttaacatttgctcccgaaatatttcttactgtgtaaaagaagctagcttagtctgtacctagaattcctcttggttagaggagtgagtttcttttttttccattaacttgtttcctgatcgagaaa

SEQ ID NO: 48 - protein, 843 aa, Homo sapiens; identical to SEQ ID NO: 44

SEQ ID NO: 49 - DNA, 3926 bp, Homo sapiens
ctcaccccgctctccggccgccgccggtgcgggtgctccgctaccggctcctctccgttctgtgctctcttctgctctcggctccccaccccctctcccttccctcctctccccttgcctcccctcctctgcagcgcctgcattattttctgcccgcaggctcggcttgcactgctgctgcagcccggggaggtggctgggtgggtggggaggagactgtgcaagttgtaggggagggggtgccctcttcttccccgctcccttcccccgccaactccttcccctccttctccccctttcccctccccgcccccaccttcttcctcctttcggaaggactggtaacttgtcgtgcggagcgaacggcggcggcggcggcggcggcggcaccatccaggcgggcaccatgggcacgtccgcgctctgggcgctctggctgctgctcgcgctgtgctgggcgccccgggagagcggcgccaccggaaccgggagaaaagccaaatgtgaaccctcccaattccagtgcacaaatggtcgctgtattacgctgttgtggaaatgtgatggggatgaagactgtgttgacggcagtgatgaaaagaactgtgtaaagaagacgtgtgctgaatctgacttcgtgtgcaacaatggccagtgtgttcccagccgatggaagtgtgatggagatcctgactgcgaagatggttcagatgaaagcccagaacagtgccatatgagaacatgccgcatacatgaaatcagctgtggcgcccattctactcagtgtatcccagtgtcctggagatgtgatggtgaaaatgattgtgacagtggagaagatgaagaaaactgtggcaatataacatgtagtcccgacgagttcacctgctccagtggccgctgcatctccaggaactttgtatgcaatggccaggatgactgcagcgatggcagtgatgagctggactgtgccccgccaacctgtggcgcccatgagttccagtgcagcacctcctcctgcatccccatcagctgggtatgcgacgatgatgcagactgctccgaccaatctgatgagtccctggagcagtgtggccgtcagccagtcatacacaccaagtgtccagccagcgaaatccagtgcggctctggcgagtgcatccataagaagtggcgatgtgatggggaccctgactgcaaggatggcagtgatgaggtcaactgtccctctcgaacttgccgacctgaccaatttgaatgtgaggatggcagctgcatccatggcagcaggcagtgtaatggtatccgagactgtgtcgatggttccgatgaagtcaactgcaaaaatgtcaatcagtgcttgggccctggaaaattcaagtgcagaagtggagaatgcatagatatcagcaaagtatgtaaccaggagcaggactgcagggactggagtgatgagcccctgaaagagtgtcatataaacgaatgcttggtaaataatggtggatgttctcatatctgcaaagacctagttataggctacgagtgtgactgtgcagctgggtttgaactgatagataggaaaacctgtggagatattgatgaatgccaaaatccaggaatctgcagtcaaatttgtatcaacttaaaaggcggttacaagtgtgaatgtagtcgtggctatcaaatggatcttgctactggcgtgtgcaaggcagtaggcaaagagccaagtctgatcttcactaatcgaagagacatcaggaagattggcttagagaggaaagaatatatccaactagttgaacagctaagaaacactgtggctctcgatgctgacattgctgcccagaaactattctgggccgatctaagccaaaaggctatcttcagtgcctcaattgatgacaaggttggtagacatgttaaaatgatcgacaatgtctataatcctgcagccattgctgttgattgggtgtacaagaccatctactggactgatgcggcttctaagactatttcagtagctaccctagatggaaccaagaggaagttcctgtttaactctgacttgcgagagcctgcctccatagctgtggacccactgtctggctttgtttactggtcagactggggtgaaccagctaaaatagaaaaagcaggaatgaatggattcgatagacgtccactggtgacagcggatatccagtggcctaacggaattacacttgaccttataaaaagtcgcctctattggcttgattctaagttgcacatgttatccagcgtggacttgaatggccaagatcgtaggatagtactaaagtctctggagttcctagctcatcctcttgcactaacaatatttgaggatcgtgtctactggatagatggggaaaatgaagcagtctatggtgccaataaattcactggatcagagctagccactctagtcaacaacctgaatgatgcccaagacatcattgtctatcatgaacttgtacagccatcaggtaaaaattggtgtgaagaagacatggagaatggaggatgtgaatacctatgcctgccagcaccacagattaatgatcactctccaaaatatacctgttcctgtcccagtgggtacaatgtagaggaaaatggccgagactgtcaaagtactgcaactactgtgacttacagtgagacaaaagatacgaacacaacagaaatttcagcaactagtggactagttcctggagggatcaatgtgaccacagcagtatcagaggtcagtgttcccccaaaagggacttctgccgcatgggccattcttcctctcttgctcttagtgatggcagcagtaggtggctacttgatgtggcggaattggcaacacaagaacatgaaaagcatgaactttgacaatcctgtgtacttgaaaaccactgaagaggacctctccatagacattggtagacacagtgcttctgttggacacacgtacccagcaatatcagttgtaagcacagatgatgatctagcttgacttctgtgacaaatgttgacctttgaggtctaaacaaataatacccccgtcggaatggtaaccgagccagcagctgaagtctctttttcttcctctcggctggaagaacatcaagatacctttgcgtggatcaagcttgtgtacttgaccgtttttatattacttttgtaaatattcttgtccacattctacttcagctttggatgtggttaccgagtatctgtaacccttgaatttctagacagtattgccacctctggccaaatatgcactttccctagaaagccatattccagcagtgaaacttgtgctatagtgtataccacctgtacatacattgtataggccatctgtaaatatcccagagaacaatcactattcttaagcactttgaaaatatttctatgtaaattattgtaaactttttcaatggttgggacaatggcaataggacaaaacgggttactaagatgaaattgccaaaaaaatttataaactaattttgtacgtatgaatgatatctttgacctcaatggaggtttgcaaagactgagtgttcaaactactgtacattttttttcaagtgctaaaaaattaaaccaagcagcttaaccatggtttgtgcctgttcctctaggatgaactcctatcctgagtagtaccaagtgttctaactaaatgtgtgagctgtagttcttgatgttgtataactaagcctgtaattgggctggtttctcttacaccctagcacagttaaaaaatgaagtactgtttaacatttgctcccgaaatatttcttactgtgtaaaagaagctagcttagtctgtacctagaattcctcttggttagaggagtgagtttcttttttttccattaacttgtttcctgatcgagaaa

SEQ ID NO: 50 - protein, 871 aa, Homo sapiens; identical to SEQ ID NO: 46

SEQ ID NO: 51 - DNA, 80268 bp, Mus musculus
  misc_feature (1)...(80268): n = A,T,C or G
acaaaaaacacccaagacagacgagggaagaggaaggaaacaaaaagctgccccttatggaagatataaagggtaagaccagaactgatttgatccaaacccttcagggggaaaaaaaaagcccagacccaaagagagtacttgaaagaaccaaaggcaaagagcctgaatgaactctccctgtctcctgagcgaggcagaaaaagctttgggaaacagacagagctcagggttgtagtgccctggagtaggctgaagtcgatgaatattcataattaattggtatgcagatgtggtttttttaagcggcaagtgactgtttttccagtcctctgtacctaaagaggcagctgcttcatctacggtctggagtcatctagtgtcggtttgggtccctggcttgcagatgttgggttctgcgtgtagatttgttttgttcgaatttcctgctgggacattagcaaagactctcgctccttctctgctgggagttggacaggcaagttaatgtggcaagaggctgtcacaacaggaccccagagtgcgtgttgtaaaaatgctgtaagctgtgtgggggagtgtgcttgtccctgagagggagaaaggggtggagggaagaaaggaagagttctcttaaaagagcaggtcagatcgaactgaccatgttagatttttgcctacgaaactgcaagggcagactggtttgcacaaatggtgtgcagtctctgccttttacctcttttgggcattttctgccaggaccgagagctagctgcttgccagtccttgggagccaggaacaaagggggaatgtagggtcgcgaacctacttcatcgcaccgccagcttctcacaggctcacagatttctatcacgtaggatgcagagggactagagaactagcaaacagatttcttcccacgtagagcagaccaaagctgtgtgggcttcctaaggttttatttactgtgtgctgggacctgtgctcctttccccatacgtgccgctcagcttccctctcatcagccatataaggtaagtgttgtccctatcacctccacttcctggaggattcagtgctggaactaagagcagaactcaccttgggatcctgtaattaggaagtggcaactgtagacgcaggcaaggctacttaggaagacggaagcttggaccactggatgctagacttgtgggtctctgaagctcgtggggaggagatgaaatctagtctatgcaggaacttgtattttttcgtgaagtctacaccaccaatctcagttggtgttaatggtcattccttctgggagagaggcagacattgttattctgtatggtcttttacgaaagagagggtctgaggcttggaggggttagagcctatgaatcaaacgtctgtctaggtgtcaaaaagtcttacatctaactagagttcttctacttctggtttctcttctgaacatgtgtccccaccccccagctagtactcaccaagctactttcagttccccagggacctggtctttcctcctgctcagtcagcagcaaggcactttcctccatcttggaggcctagctcacctttttttcttctttatcctggagtcagcccacctctgtttgagttcagctccatctctctctctctctctctctctctttctttctttctgttttttttttctgtgagcctcagctttctcacctgtgaaatggagagaataatacctgtaactaatgtagactgtgtgctcaataaatacagactactgctcttactcctagatttttcttgaatattgctctccctgttaagccttctcccatcctttggcctagctcaggacctgccttggccacctcaaccagttttaaagtggtgttcatcacgctcattttccttcactctatgacactttttagcccacaatgctaatttttggattcaactttggatgtatgatatcaagtgctcaagtgcacctttttttttttttttttaagtcttaaaaagaatagccactttgtccaggcaggcagagtggtgggaaagaggcctctgtcatgacagagggcagaaggtggctgggtactcacgaaccagcttcggaagtcactggggaagaatactgagctaggttattgattcagtaaaagccacaagacaagtccgtggccccgagttggactagcagttttcaccacataaggtctgtaatgttctctgatgtccttatgatgaatcagctcctaagccacaaggataagtccttgaggttgacactatctcagaggcgatgctgtgctctgtctaaagggtgcttcttaggcctttgcccaagtccagaaagttcctgtcagccacaagaaccttgagctccttagtgggcactcaaacagtgtctaaagatcggttattattgtagttgatgttcattcaagagtcggagggcttacaaggagcctttgaattagtcgtagagcttccctcacttggatgcagacagctcctaagcagtccacatctttctcagtagatactctgaaaaatgaaatgcccctctctaggttgatggtctttttttttttaaagaaagagttacagtgtgtgtgtgtgtgtgtgtgtgttctgacacaccagaagaaggagtcaaatcccattacagatggttgtgaaccaccatatggttgctgggaattgaactcaagaagtctggaagaatagcccatgctcttaactgctgagccatctctcaagaccctaggttgatggtcttaattgatgtgacttcatgctaagacaccggtttgtcccatacagtcctggatggacttcaacccctagtctccgctcaggcagggaccaaactggatatttttagatgtgtcctagcatacctttgctgtctctgaacacaacatgtcttttgataaatagcatctctctaagtcccactttatagaaattttgctgtctgaagcatcgtgttatagtaacaaaagaaaatcaaactctgcagagtctggccctgggtaaaatcataatgtacattgtttgttcccagcaccacccccttcctctccctggcataccttcaaagcaatttgacaaatattgtttgtctgccagttgtaagtacctacgccagctccttgggatataaacagtttgcacatgatatagtagggaaaggagacatatgaaaccaattctaatagaagccagattctgtcaagtgctaataatagctaacattgattattatgtgccagatgttataatggctcctatatgttgtctcatataatcttcacagcaactctttggtattgatttatgcatgtcacagtaacaggaggaagttgcttagtcaaagtcacacaactggtaagaggcagaggggacatttttgactatgtggtcagtctgcaaagcttgaactaacaaacgagtccttcctcctgagagccactaggtcagtccaaagaccgtgagtgccacgaggaacacaactcaaagagtgggctgctttcagctggacttagaaagataagtgaattgcagtgcccacagaaagcccctcccttccccagacaacagcgccagaggaacatttcttgctaaagctgcagcccggactgaagggtgaaaaactcctctccacggctctgagcaggatctatctgcatctcatccggtagatttaaaggcagaattgcagactagagtcttgaccatgggtttgggattaccaatcatgcaattaaatacacatttacagaatgaccagctgcgcgttaaatgatttccttaaccttgacttctctgcatagtaatagagtaagtgctgagctgtatctggcagcatgagtttgtattgcttctcattggctaaagcacctttacagagtctttctctccccacgaggtgttccggttgcttctctgctctgtcatcagtagtcgtgaccaaggaatgagtgtttaattcaggtgtgctggctggctcagcctgtatagggtgatgacaaggcctgtggagaattatgtagagcttattccttcaaatatttgggggaaagtccaaaaccaagagtagcccttgtggtgaagactcatcagacattttgatgatttgacagagaaaagagggaaggcatgagctttgtttacgtcacgtgtatgtgcatgtgtgtgtgtgtctttgtctgtgtgtgcatgcttgtaagtgtgtctctctctgtgtgtatatttctgggactgcgtttctcagactttagacacaagcatcattgaagatcttaattttcagagtctccttcagaagcgctggggtaaagctgaggtcctgcagttcttccacgggccgagtggtgattggacgccaccaccaccctgactggcagtgctacaaggccgtgcatgtcttagtctgtttattttggtaccagtagatcataccctctctgagctgccatgtaattcactatgccattgctgaataacaggaagcctgattcacttataggcaaagaaaaattcattccctacaacctgagtttccagcctctagtttgccatgatctaggaccaagtgtgtaccttcagcacacaactcactgcagaacagaaagcccttctgttagggttcttcaatattttcactttgaaaaagatttattacatctaaggatgattacgtgtgtgtttgtgtaggtgtgtgcacgtgagcatagatgcctatagatgccagaggcattggatcccctggagctgaaagtccaggtgggtgtgagccactgacacaggtgctgggagtggaactcagatcctctccaagaacagctcctaagagctcagccatctctccagcccgttttcaactttctctgtttccccagagttcctaagtcccccaagcttctctcattctcccctttcagcttgagcagggctggaagctcatgtgtggccgcctgtggaaacctgtgctcgatctaggagtgtcagggggcctgcgggttcccggaactcagagctctgagcttggccacagcaagccaggcccaccctatgcctgcactgcacacacagggtggaaacgatcctagctgcaaagatcggacagtgggttcagagaggagtgctgaggccccttaggtttggagaaatgaagctgtgcaagaggttgtctgagcagcacacaacccggactttctgtcctgtattatcaaagtgcttagagaccaaagtggagaatctgaccaacacaaagaggtgtttccattgacttaaaaacgttttgttgttgttgttgttttggttttttgagacagtgtttctctgtgtagccctggttgtcctggaactcactctgtagaccaggctggcctcgactcagaaatccacctgcctttgcctccttaaaaacatttttatgtaagaaatgtttgacctagataaaaatcaccacacacacacacaccctgacctccagacaaggcttgcgatctttctgcctcagcctcctggtgttgaaattataggcatgtgtcaccaagcctggcaacaaaattctttataaaaggagacagtaaaagccgggcgtggtggtgcacgcctttaatcccagcactcctgaggcagaggcaggcggatttctgagttcgaggccagcctggtctacaaagtgagttccaggacagccagggatacacagagaaaccttgtctcggaaaaccaaaaaaaaaaaaaaaaaaaaaaaaaaaaaaaagggatacagtaagtaacaatgacatttcaaaacaaaatgggggcgggggggggcaggtttagactaatgcctttgaagtagaatacaagaaagtaaaagatgtgaaggaatgtaaggaattatttttcgtggtggaaattcaaggaatgatttcagagatgtttcttttggccgcatacagagtatggttgcccagttcttacactgatacccgtgccacattgcatgccgggagaactccatgtaccctgttaggatgaggagaggccacacttgagaaagctggctgggccacccctttcatctcacctttacttggtactgcctcaaagttcgtgatagctctggcttttagtgagggtgtgattcacaagtattttccatttggtagcacagcctcagttagcacacatttgacagttacgtagctgatttaacaatttccgtcttttgcaacaccctcaataaacatcagcgcaggaagtacttccttaagtagggttgtgccccatgagaatggaatcccagaagtaggagttctgtttaaaacctgtgaacattttctgaagctctcggttgccattgctaagttgccctcccaaggccaagttggttcccaaggtgtgagccctttgagccatggccgcttcctgtttccaacatccttgatggcgttagtgactggttaaaataataattacatccaccttaaaaatcttagtaatccttcagtttctaggaatctttatggcgcttttcacacggtatgcttaggctttcacataatgtccacattctttgctcatttattactaatttgcattttatgtttttagtttgatttctgtgatccatcactaaagagatttagctttctgcagtacttgcaatagttttgtggaatctgttccttatggatatgttacttttaaaatataaaattgatcagtttaatcaatttaatcagttaaatcagtttaatcttttaaattaggttgtacttcatctgtaattatatttttctcccaagtgaaattacagtgtatgggtattcactgtgtatgtgtttatgttccacatgtaggtggagtcccaaaattcatgttgatgtcttccttaaaaatggtcaaccttatacattaaggtggggtctctggatgagccagaagcttgctgattggctggctagtcagctctcagtatccacctgtccctgttgctcaagacaggcattctcagcgatacctggctttttacgtgggtgctggggatttgaacttaggttcccaggctttatgcagcaagcactcttacctactgagctagctccctgtgcccagactccaagtacttggagagaataaattgtgctaatttgtgatagcagccattattaggactctaatatggcaaatatttaataaattggtatgaaatcgctttaggtaccatacagatggatttgggtcacaaactgttctaatcattttacagatgctaatttagttttgaaacacaaccagagattggtgctatttaatttggcaattttactgatatttgagcgatgagggcagtaagctacttagctactgcctctcagttggaaagtgtgccgttcagactcaaatcctgggcgttggtctcgttatttggagagatggtttacataccatatgactcatgcatttgagatctacgattcagttggtgctagtgtatttacactattgtggatgagtgtcacaatcagttttaatacgttttatcattccaagccctctgtacccattagtaatcactcccatttcctatctattccccaaccctcaccctcttccaagccctgggctcacatggtctagtgtttatagtagctctgcctattccagctatgtcttgtctattccagtccatgttggatcacatgttagctatctgtccatcactcaattgatttgcaggctgtttcacatcctgggttttttttttttttttttttcctgtaggatggcactttgaatgtgtttgaacaaacttatgtatagacaataccttgcattcccatagggataaacctggcgtggaattgttcagtagtgtctatgtctactcacttgaggcacagagagactatttaccaaagtaggtgtgctattttacatcccagagtgtgatttctagtgtctctgcaccgttgtcgtcagtacttgttattgtctgtcatgggttagagccttccttcctaagaggcggagttgtgtctgtgtgcttcgggtcttgtttctagcggttgatgctattctcatgagatctctgggcagctgtgcatcttctttggagaaaagctcatttggatttttttttgccagtttttaaaagtttggctttttaattattgaattgcaatgattctttatatgctccttttgttcaaatatatgacttttaaaattcttctatattctggttatcttttcatttttttaaaaaaaaatcttttgctgcacaaaagttttacatcttaacaatatccagctcatattttcttagcatcttatgtttttgatgttttgatgtcatatctaggaactcggcacctaatccaaagccatgaagtcatttatgcccgtgaatttatttatttattttatgttgtgtgtttgttttgcctgcatatctgtgtaccacatgcatgcagtgtacaaggaggccagaaaaggtcattggatcccctggaactagagttgcagatgattgtgacctgccatgtgtgtgctgggagtcaaactgaatcccctgagagagcagcaagtgtcctcaactgctgagacatctctccagtctcccatattttcttcagcattatttttaatggtttttatccctatatgtaggtttccaatcctttctgactttctcttcccctctccacaacttcttctggactatccagtggcctcggcgttgtttgttgagaggattgctgttcgcctcggtgaattgtctcggcatggctgagaacacacgagagtctgtttctggagtctcagtcctgaccactgagctttcctgctctcatcctgcttttgctccggtcggtcctcgtcactgtacctttctagggaacttcacactcagatgtctgagttctccagcttggcttttccttctcaagatcatttcgctcttatgtgtcccctgaattttcaaacgaatgttaggcccatcttgttaatttctgcgaagcagctgcttgagagtgcggtaaggattgtgctgagcacacatgtatatggagaaggctgtcatcaaagactggggctgcagctcagtggtagaggtcctctaagctcaaggcagcctctagtactacaatgtaaagagacaaatgaatcatacggcctcttatccacgaacaggtggtagctcttatttttattggcatccttaacgttctctagtaacagtttattgttttcagaccacaggctttaggttccttttgtcaaatttatggtgaagtttctcccttcattttgatgtctttgtaagtataattggagccaggcacaaactatgagcctcagtgcttctcaggcagaggcaggcaggtctctgtgagtcttttgttcatatacactgtccatctttatttccagtgcatctattccacatttaaaccattggcctttgaagttaatgttcactgtggttttggtggaagaatcgatgtagtctatacttgtttttaccttccgttctcttttgacacaacctttgcttattcatcgtcatgtatacagcttcaaacatgtggatgatagatatctcacttttaaatctgtgggactctgaaaagaaatgcacgctgcatttaattgtatctctgtattgaagcacaagtgagcaactttgatgttaatggggagataggacttaagagcacctgcttcctgtgtccttctattttataaatgtttaatctgtgcatgttgtcaacatcagtactggaagcatagttatcatccacagtggccatcagtactgggagcacagtcatcatccacagtggccatcagtactgggagcatagttaccatccacagtggccatcagtactgggagcacagtcatcatccacagtggctatcctctttagccattactaatcagactcctctctgaagaaatattctggcattcagtgtgattattttctcacaatgctgtctgcgttcttgagttcttaatctgagctctcttcatgacaatcaatcttttcagcataacaaattaactttccagaaagatgatcattgtgcagaagagcaacatgctgtcttcagagcagagatcttcattgccacatcaatcactccactgtcttgggaaagccgatgctgtagagaagctgaggacaacgctgttttcagtgaatggcatctcagcatcacaacgtttgtggcaaagtagctgaggatagactgctttatttggactggcctaggataaccctgctgttttccaaatgcatctgttcttgggatgagaaaatcctcccatcatctccttggtccctgccctctccttttgttttaactttgcaagagcttattatttggatgtctttgaaattcatagttctttatttcttctttatgctttctttccccccccccttcatttattttccaccatattccaatagtgttttcctgagattttcctctgtgctgctcaatttcccttaactagtgccaacatcaaatttgactcagctgcagtgattttggcttccatggaatcttttagtgttttttttttttcctctcatagcaagattctttcctatccagttgaaattaaagatttccttttctgtcatcctttatatcaatttatcagtggagatgacattctccttgatctttcacctttattgcaaatcttccttcattccttctttctttccttccttccttccttccttccttccttccttcttcctttctttctcttatgtatatgggtgctttgcttacatgcatgcctgtgcaccatgtgcatagcccatggaggtcaaaagagggtgttggataccccgcaatcagatgactttgagttaccatgtgagtgctgggaattgaacccaaatctttctctggaggggcggctagtactcttaaccactgagcaatttctccagctgcattttttaaaaatataagtttttttaattggaagaaaagagactcttaaaaaaaaaaaccaaaacagtacatgtatacaagtgtgtcttcactttatgataagatttaaatgagttttactggagatttacttccaacaaacctgagaggggtttggagtgaatggtttaccctctgctctgtggagtctgcttgggccttgtttaggatctcaaaggctggatcctcacctaaatgtggggagaaatctaagttttccaagaaaatggcttactctgctccaggaaagatggcaaaaatcaccttggcatatttccatgtttcagaggacagagagtcttggctctcagagttctgtcagtattgttgttcagaggcgtaagttatctaggaaggtcccatcttggggccatgctcttgctttgcttcctcctcagagagaggacttgtgtggagctgggcactgagctctgcccctgtgctttccccatagtgatgctgtcctgagaggttcggtctctttgtacctcagacacatggctgccaacttgtggagggtggggggcaggaacaaaaacaaaacaccagaggtttcctcagacattcctttgttcctcttggtcctgctcacactgtgctgtctttctgccgtggtgtgttctgttgtgtttatgttgccatcctgttcagtggccacaaggttatgagattactctagggccattctaagaatgaaccaaccagttagagagcagttcttggaggggttagcattaggcatctgcaataatgtctcagtaagcacagggtgagacggtcacacagtaaagtgtagaaagaggaatgagcaggaaaggcttagttttggcagcatttctgaagtggagttggagaggtaataggttggaagagaggggaagaaagatgtcaaaactcatcccaagtcacaagttaggtggttgggtcaataaatatttatgatgaagactgagaattggagagagaaagagagagagagagagaagagaagagagaatttgacagataaaaacatcttggatagtctaaagttgagaagtttataagacatcaggtaaggcatggatattctgatggttgctgggaatttggatgtagaacttagagatcaagagatcagaggagctataattgggatgcagagttagtgttccagtgtaggcttaggtgagtcagcctgtagtacagaaaataaagacagaaaatcgtgggaaaaaagatacctagggaaacaccaggttaataaagggccaaggagagaaaaagcttaggaaaagagactcaacaagggtgcttttaaaagtagaagtcaaagagacggtttgaatctggtagttggggaaaccatgttcatgttcacagtgacagaaaaggcaagaaggataatgagactgcacacagcatctctcctgtagtgcactctcacccgcatcctctgttccacccacagcatgaggctgcataaagcatctcttttgaagcatactcactattatccttccttctgtccacagtccaatgctttgggaactgagatgcactttatgcttgctgctaaaaactctattctctgaacaatgaggaccagcaagctggctcaatgggtaaaggcacttgccctgactacatgggtttgattttgggggctcacatggttaagaaagaaagctagttaccctgcaagttgttctttgacttccacatgtatgctgtgggatgcacataccatctctacagacagataaataagtaaatgtaaggaaaaaacccctcgaatggtgtgtttacactggaggaaatacggtgatttgattgtggaatttggaacttaactgttattggtatagacaacattcacagaatatttatctatctatattaagagattaaagtacaaaaccaagaaagtaggaatggagggcttcatgtaagaaaggaggtattatagggaaattagttagacaaaactaagagtgaatttggccacatttgaatcataaaagccagcagatggaagatggcccagtattcattcatcagactgcagttattgaacaaagtatgtgccgaacactgttttagatgcagagggtacatcaggagacaaatacaaacccttgacttttatgggtcttatctcctagggttgcaggaggcagacagtaaacaataaagtgtatgtgtgctcagtgacaagtgcccagaagaaaaaataagcaagccaggcatggcagaggtgacatcctgttgcagtttctaggacaaacattctaggcagagggaccaggagctacagagtcctaacaagaagtgagatgtgtaagaaacaaggactgcagcgtagctcaagtggagtgagggagtgagaaccaagagacagaatctaggtcctcgtgggcctcagaaaggctctggcttgtattcacagagaaacacaacatcatcgcttcttgtccctttggctaagatcaagtgtagagaaacaaaacatcacagcagatgctgagcacagaagtggctttgtccagtctgtgtcttaataggatcactctggagagagactgggtagtgatgcaggacagagatgaggggagatacccagtagtagtagatggcaggaggagaaatgttgagaaacaattgcattgtgtctattttgaagatagaggatgtgaaatttcccaattggatttgaaccagaaagagagtaggaaacttgacttcaaaattttagtgtaactagaacggtagagttgccttgagactatagaaggaaggggtttgggcgggaagatgcatcactgtcttggatatgttaggtccaggctactgtcttttcacatggatgtgacagaatacctgacaggagcaacttgaggcaaaatgcatttccctgagctcactcacggtttcggagctagagactgtcttgatggggaagggatggtggctgggacctgtgtggtccagggggcttgtggcacaccttccttagcaattcacaggtcaggaagccgagggcagttaacctgacccctcagcagcttgccacctgcagccaggcccgacttcttaaacgttctcccacctcccaacatggtgccaccaactggaaagcaagtcttcaaacccatgagcccgtgagggagttttacagtcaaaccacagcagacatctattttaatatggtgactgcagagacagcaagtaagcatgtgcagaaatctggagcttgtgggagaacactgagctacagctaagaacttgggtaatgatgaaacgtttaagtccagtgagcccggattatctgcaatgagaccagttgagtaaaaccaaagaagtaggtatagatggagaagcgaagaggtttggggcattgaggtcagccccacccccatatttgggtgttgggggtatagaggggaggataaactatgggattatgatgtgtccaggagagccaagcagcagcagaagaaatggtggtagtctgggtgttttgatgctcatgggtcaaaatcaggtgaaactgggggattagtgtggcatttggaacagtggaggtcatgagatggcctttgtaagacacttggtggagatggtcctgtttgttcgtttgtttttaagctttccaatttccttttaaaaaaaagttttatttattatatataactacatgtagctgtcttcagacacaccagaagagggcatcagaactcattacagatgattgtgaactaccttgtggttgctggaaattgaacttaggacctctggaagagccatcaatgctcttaaccgcggagccatctctccagcctggttctgttgatctaattccctcatttctatcctttccctttgtccaagaactagggaagaatttttgacatctgaagaagttggttgagagggaggtagacatgtttcctcaaaggaaatttcaaattatggtgccagaagcagaggaaatgaactctcggcattcagtaacagtgtttgtccactttggtgcagatagtctgccgctatctgttggaatgtatttgtgttcctgccatgtgaaatcatttaggatggaaactcttatgggcaggtttgtggttccatggtgttcatgggtgtcagattataacattttctgtgaaaaaagtatcagcattcaggacaagccagtccagtttatccatgatcatggcatgccctgtaatcaaccaaggttctcttttcgaatagagaaaatgattctcagatattcttagggttacgaatgttcttcccttagtcaaaagccaccactcacaggccattctttgatatacctgttgggattttcctgactttttttttaagtgtgtgcatacataatatgctagagtacatttgtagaggttagagggacaactcctggagttgatactctccttccaccttgctgatacaggatcctcttgaagtcttcactgtactgaatactccagtccagctggttcctgagctggtaggcactctcttgtctctgcctcccctcttgcataggaatgctgacatcacagatgcacatacgctatcaaggtttttcatgttggttttgaaaatcaaacccaggtcatcaggtctgctcagcagacactctgacctgctgaatcctgattcttttctgctgagtcacgattcttatctgctgagtcacgatttttttctgttgagtcatgatgcgggctgctctctgattgatttttaaccttgttggactgtagtgtattttgttttcacctttagtggaaataaggctctctgaacccaccacatctgagtaacatctgtgggagacaagaaaggtcgttcagttcagcacaattctgtagctggtattggttcaaactttaggagtctgatcctgagtagtttattttagggatatttaactacagcacaatttggtgaaaaatctcctagtgataaataatccagtcccttgtgcataataaagcttaagacatgaatgactatatcaaaactgttcacaaagtactcatgacaccttccataaggatgggttctatagattgacaagcttataataagggcctggtggatgatccagtgtcatcttgaccacacagatagtgcaaaagtcaccaggctattagccacgtctactcctacccttctgggtggaaaacaggttatgcaccccaccccacccccttggaaaggacaagcctcctgtgtgtgtaacattcctggttcccctagtgcttatcagtgagctcagggatcaacatgcctcccataactgtagtgctttccgtgtgttatactgactgaaaaaaaatcttctcatccccagcttcccccatccctggtttatttgacttacccttactcattcagccaggtttgtaaaaatgcaccaaggctgacacaggagagcaggcatgggcgctccttctgtagctaagcaacttgagagggaagtggcagcttggctagttctgaagacacctacaatactttgctctgttttacaatacatttatctatatttatgggtgggaccattttcaatagacaattttgtacgtcaaaatgaaatgattggcatttcttatgagtcgtcctattaacatccaaattttcaaggtatccaagcaaatactgcggcttctccccaggaatactctggaagtacttcccatgactcccaagcacgcaacagagctgctgtgcacagttattgtgtgggttagcatcagggtctctgggtggcctatgatgtaagtggtgcctcttgcgctatgcggcatgcaacctgcaccagacccatttcttttttcaagaggctaaaatcagttgttaaatcaaaacctaccaattaatgctttggataccgtcctgattgctgggtattgaggcctgctagagctccacagctgtttcatagcggaggtagaggaagtcccagtggataaagactatgggaaggacgtgaatgtccccatcacttgcaaacccagtcagttgctacagtgaggcgctgttttccacaaaaaggaaacatttctgctgttctttttcttctttctttttaatgatcagtaccactgaagggacaggacgttctttttttttcttttttaatatttttattaggtattttcctcatttacatttccaatgctctcccaaaagtcccccataccctcccccccaactcccctacccacccactcctactttttggccctggcgttcccctgtactggggcatacaaagtttgcgtgtccaatgggcctctctttccagtgatggccgactaggccatcttttgatacatatgcagctggagtcaagagctccagggtactggttagttcataatgttgttccacctatagggttgcagatccctttagctccttgggtattttctcgggacaggacattcttaagttggcaaaagtgtaagttaaactttgctgaatggtggtttgtttataattatgtaaggcgtgaagattgttattattctgatcctacaaaaactgtccaagaaagctatctagagtatgtgcataaatgttccctggagggcatgtgctgacgagttgtctgctggagtagcagagggaaataacctcacatatagctatattcaagagagattatgacaaagagttgtgagcctaaaggacgctattgttatgaggaccagttaatcaaagtgagcagtcaagacctattggttcgaaaataattaccttgacaaaaaatacgtacagaaagaagaccaaaaggatgaaatattaaaatagattgtttacaaaaattttatttttctttttgatatttctgtatctcctgaatcttaacaagcatatatttttttttgctgagagaaatactaaatgagacttagaaatatctttcgtttaaagttaatcggaaagtactaatctactagcaaaaattaatcagaattaaaaggattatatgaaatgtgataacctgcttattagcctgacttccaactatgtatgtaatttttctaccaggctacaagcatgcaaagtctgtctctctgagagtcagtatcatcacagaatatcaagagcttagatctgaacagttcagaaaattattctagaaatgagaagcaaatacatctggatttgaacgaagaaaaaaggcggaaaattaactgaaatgatgggatcaccataggttgactcagaaaatcatgtattttgatgcaatgtgtctgtgcgaagggcggtgctcccagaagtgcagtgctcccagaagtgcgtttctaacacttttactgttgaggctctggtagaagaaagctaatgaacaatggggaacattttacatatttaaaagcaccacaacaaaaataaccaacaaactcagtagtcagattggcagcggccacctctgcctgtcttacagacagtctcctgctcagagcaacaatgtctgtgcaccggaggcacaggaatctagtgactgttttagggcagagccgaccttggcatcccttaactcagaggctccaggaggctttcatttgagagatgattgggatatttttcctttaaaaaaaaatcagtatttcatgtcagagcaacctgagaatataacttagactcgagtgtacaaagggacagtgacctgcagtcccctttctaccccagctccatcttcagttcatcctgtccaagacggctgcctttaacctttgtacagtgtcgtctggcatgtgcgcctggttagcgtccgctgagatagctgctgctttcctatcgtgacagccaaatctttcacccctccacctccagcctctcccccggcagtgatggacagatctggggtaggcagcagcgtcccctgcctacgtcagcatctgagtaagtgttccttcctcttaggtttccttccctgtgcatcctttaccctgcagtaacgcctggatctccacttgctgagttggctgttctacttggtaactgggttgttccccccctcataaaccaagttaaacccaaatttagttgaattctgactgtcagcagtgtcacaggtgtcttatccttccctccattgcagctttggtttttgttctcttttacttttgccgtcttcctttcttgcctgttcatttttgaagtctcccttgtgaggcttttgtcctgtttagtttcagctgactgctctttgtcattctctgtccgctggcctctagcccatgttgactctcgcactaaacatctcttcctctttctaggttcccagcctcaactgggtggagcacccttcagcaactcgctgaaaacaggcgctcagagggaagatgcagcgaggctcttgcatctcttagggtatccacgtcaccgctcttgttcctaagtgtttctgtgtcatctgttgctcccacccaccctgtttccagaaaggatgtaaaagtcttggtcttttgttttgttttctagtcttgtatgtactagaagtttatggtgatgtgttttggcacaagctagtttctgtcccctgtgatccacccgttttgtgatttgtgtattgcgtgggagcatttgtttccctcccagtcagaaattctcatctttcagttctggaaatttccctcatctctggtttcttcccatcactgtctgtgtctgtttctgcaaagccttctgagtatggcggtgctctgttttcagggggtgctccctgactagtgctcactgtctaggctatttcctctactttatggtcaacatttttttaaacttttttcttttattgaaaatagttgttgttttttttttaaatttactttacatccagaccctcaacacctccccaccccagccctgtcccttctcacctccaagctccacccttacaaatcccaacccccatcactccctccccttcttctcagacaaggggaagtccctcttgggtgctaccctaccttggcacatccagtctctgaaggcctaaccgcatcctcttccactgaagccccacgaggtagtccagttaggggaaggagagccagtggcaggcaactgagtcagagacagcctccactccatttgttagaggatccacatgaagaacaagctgcacatctgccccaaatgtgtagggagcctaggtccagccaccgcatgctcttgggttggtggttcagtctctgggagccccccccacccccgccatgggctcaggttagtagactctgtaggttttattgtggtgtccttgacccctctagctccatcaattctatcccctcaccatttcacaagaaaccctaagctccggctgatgtttgactgtggtctctgcatctgtttccatcagctgctggatgaagcctctcaagagacagttatgctaggctcctatctgcaagcatagcagagtatctttaatagtgtcagggttggctctttcacatgggatgggtctcaggttggggcagtcactggttgactgttccctcagcctctgttccatctttatccctgtgcatcttgtaagcaggacaagttttgggttgaaggttttgtgggtgggtggatgtccccctttctccaccggatgtcctatctggctacaggaggtggccacttcagtctctatatcccccactggtatgaatctcagctaaggtcatccccatagactccgtgtagcctcctccatcccaggcctctggctagtcccagtgatgcccccaccgatttctgttctcactcccagccctctctcagtttggttattttggataaattcctaaaagcctgactttattttctgaggacttacttaaacacagccatactcttcctgctctcacggactcagtatctcctggtatagtatactgagcgattggcaagcagaggaaggagaacaccagggctcagagtttccttttattcagcctgagctctgagcccagaacctggaaccatccctgttcagggtgggtctctggaaatgacccacagactcatcagatccatggctactaggtagttctaaatccagtcaagtcggtcatgagaattaacccttacagtgcctaaataatttgtcatgcgccaatcaaacccacagttcagtttctttttttttctagctgttttttctactgaattcgtaaaaatctttcctcgctctgtccagttgtctcacaaagctagaacattctgtctttttccaagttacattccctttcccatcatcagaactagtttttctctctgcgctgtagagagcctccgccatatgtaaattcctttccgaaggatgaggccctcagatacttgaaatgatgctgtcttgggtcttccacaagtgccattccctagcttcaagaagcctaaaacttaattcttcccttgagcacttggatgcgttttgaatatgaaatacccccccttcaggtgaggggctgttggcttccaacctaggagctttgagaagtaattgagttctaaccaaatggttaatctcttgttggactcctgatattgtggcattatttggggacagtgagaagaggtggtaggagccttgttgtgagatggctcactgtggccatgtccttgggtattctatctcgacttgcttcttctcttatattcctctcttgactcccttgcccgccggccaccatgaggtggatacctccctacatgctcctgttgccaggatgttctgccccggctcaaagccaaatagtcatgtgatccctttgaaactgaaccagagacaaatcttccctccttggagttgtgtttggctgttggtcaccatggtggtacctgactcccacagaagctctaaagtggatggaagcctttggggagcttcagatcaccccctgctgcaaaggtcatgcttggtgtgcacctacatctcaatgcagctttgccttgaaagaaggccttgaacaggtcggtgtaattgttctctcctgtggtttaacctgggaactttcacatatagcttctttcctattctttcacatgctttccaaattagaggtgtgtgtgtgtgtgtgtgtgtgtgtgtgtgatccttgttggtcttactgcttttgttttttgttttttgttttttgttttgtttttttcttttgagtcttttttccaattaaatcacaagtgaaagcgccaagttgatttgaaaattggaaaaaaaatcttgttagcgtaaaatgcataaataaaactatcaggtatctatttgagaataaaaccacactataaataggcacgtcccagacatcatattaaacactcagtataatatgtcattttatttgctctttacaacagccttttgacatgagagccattgttacacccatttcatagatttggaattaaggccagtgtcatataactaggaggatggagggtgtgatcaaacctagtactccagcccagtttgtgctgtaacatggaaaagccaagctcctccccctcacatgctatgctaatggtagctgacagttctgatctggcctaatgagacatcttatgtgtttcccttctttagcagaccacgataaaggtaaaatcacttattttatagatccacattgactcttgaatgttactttttatggccctttatatgtcaacaaatccatggaccctatgcctgatactgagcacaggtcaggcaatcaggtatctttaggtcagagccaatacagctgtgaatgaggacgtgagtgatctgggaaagtgctctgacttcagtactttttagaactgtttatcgccggactaaactctccatgggcttttggtgtttgctctctgtattttttcccttctttgttgttagtgttctcaatagaatatttatagccatgaattgtgcctgaaactctttgcatatgcgagagagtatgaggaagttgccctgggcatttcagattataatgtccaagggacaggaacaaagccatgcttggtccaggccatgactgcttgtattcaaaggcttttgagctaaggtgtggggtccagctacaggctcatctgggaattactgtcttggtttgtgtccaagttattggggcagaggaattgttctcacggattctggaaactgaattcagactctagggggacttagtgaacagaaaccagtgggagaagtcaccctaccgatttcatacgcatttaaggttaagctctgggtccgagggtgggattgaaagatgggcagggacctgggtaaccagacagaatgttggttgtatatcccattgtatgctgggcaatggactgagataaggaagttttcttggatccttccaaaagagagataaatcccaagacatttagcacaggcacgtgagcaactggtttcagatgccttctgcctaatggaagaaaatctatcatagattccaggaattagatgggacttatccttagaggacaaacttactctgtcttctgtaggacagggaagagctggctaagacaagatgaaagacagatggctgatgggaattctgtgagttggagctgcttgccttcttgaggtcttggtccctcctgttttttagtcactcactttagaatatgctggtctgacctgatgatagcctgataatctgaagagctgtggaggatgaatgctaattggtggccttctctaacctgctaatcccaaagcaagaggtccatatggagcgtttccatcacacgagggcatccctcatcacacaagagcatccttcatcacacagggcatccctcatcacacaagagcatttctcattgcacaagagcattccctcatcacacagggcatccctcatcacacaaggcatccctcatcacacaagagcatccttcatcacacagggcatccctcatcacacaagagcatttctcattgcacaagagcattccctcactacacagggcatccctcattgctaggtggtgtctcttgcctagaatcccagtacttaagatgctgagacaggaggctggtgaggacaagaccagccaggagagggaagagtaggatggtaccaagtctacaacctgaggtcactccctgggatccatgtggtagaaggagaaaatggactttgcaaaagttatcatgcagtctccatactggtgccaacatgcaacacataaaacactaactaactaactaactaactagatcagtataattttttaaaaaaccaacaaaaactctagactgggctacatgatgaggtcctgctatgagcaagtgaaccttgtgattcagggtctgtttcttcattttgcatgacttactgagtgcagaactgaaccctcctcagttcctggtctgtctccttttagtttctgctttattatgtagactgtctcctttttgtttcactttcaaagtcagatattgacaaactgtgcaggtcttgcagggtgtggcaagatccagagaccatgtcatagaaggaagaacttgtcaaaagaggtagtaagacatggatgtggctgctgttaacaaggaagcgctaagtaaaaattaccactttgtttctggtcattcagaaagttttaactatttaaagagctgctcatatgaccttaggggtaggggtggggtggggtgnnnnnnnnnnnnnnnnnnnncaggggtggggtggggcgggggtcggggtgggggtgggaaagggaaatcaatctaatgctggagagccactgagggaagttctttgttggtgacaggagggtaggtgatggtgagcaaggaagatgtgaagagaggcagccacgcccatgtctcctcagtgactccaccggtctgttcatctcctctttgttctccttccactttgttgtttctccatttcccaacagcctttccattcttttagcaagttctgaatggattagctagaattctaaggctgcttttcaacccctggtctcccggaccgcaaatgttcttccgaggtggtagttattttggaggtgaagtctctgggcagacgcctaggataagcactcggaggtggaagtagatgtttggttgacttgatactcagtcccatatgggctggccatgctcctctgcttcagccttaggattcgcatgcctacagggtgtgtgtgtgtgtgtgtgtgtgtgtgtgtgtgtgtgtgtatgaacactgtgtcttacacacatacattttctgaggctgtcaagatgatcaaaatgtgatgttttatgaatatttctgctctcatcacatttccattccctggacctgcttttaccttgaaaatgccctgattcacaatgatcagtagaataatggtcaccatttactgtgtgggaagcataaacagagactttgtctatgatttcccaaggtgattcatgctgaattcacatgagactccagcattgtctctggccagcacatcaaagaaaacgggcaaaattgtccctggagttgagagcaaacacgcagtctttgctatttcctttctgtaggctgactcctccctcaggtctggcatgagtgacacgtatgttgcagcttgctgcaatccattttttcccccaggctttcttttgcatgtcccatattagctatagagcaatccaacagtccagtttttagattatatcttctattttaggacttgacattagtcccagaaaattcaactaagtgttgttgaacttcttagttcataggtattcagaaaaaaacaatacccatttatatttttcctggcattttggtggtagggaaaaaaatgtttgaatttattttaaggacaaatcacatggcaaaaagaataacaaacactcgtggttgcattgggaacccgctttcgagatagtcctgattgtggtagggaggaacagatgtggagatctttacaaaaagatagctttctagtgaactgttttcttgtctgattctgattaccatatcctgccttcctgagggaggaatggagttggatactttagataacgaaacacatgtttatttttcaaaaaggaaaaaaagtggtaatttgattgtttagtgtcatagacgaaaggaaaatggagacaggagatccggtgtcttatagtcctggatgcttcttgaaacatcctgccgcctagtgatacgcctgctgctcacaaacacagcaggcttggggcacactttatggagatactaaaagccacccaaggattggttgtcaggatgcttatcaccagctatccccagcagctcttcgtccttgccaacctcagaggcctagagacccctatgagccctgtggttttgagtagagaatggtgctaccagcagggtttgaggacctggaaaagaacactctgactttgttccccagtctttgagggacccaggaagtggcagttctggagagcaatagcagtgtgacctttcaaattccacagggctcgggtcttgcttttccttcagcacacatttaatgtagagctggaccacttagacactgttggaaggcacccacaggccccagcattctttgccccactgagttggaagacaatgaagaaagagaggagtgagttacctgctggcagaggaagttggactgggagctggctgggtagggggcagcctccagcaggcccagatgataatagaggtgtgtgagtgtgagggaagccatggggatgatggggatggccgacccgtgcagtcagcaacacaggtaaaagctctaaagctgtatatcggagtctgaaggaggaggtgctgtttgatgagggcacagcagcagcagcagcagcagcagcagcacacatgaccagacagccactgcccatccccttatcacacagtggtactgagagctaagctcctctgagtatgtttttctctctgtatctcttgctgctgcgactagacaacttcactcagttcttgttgactagcattcaacaaggttcttgcttttaggctagcttcactaacttctggggaaaaaaaagaataggagggaagggagggagggaggaaggaaggaaggaaggaaggaaggaaggaaggaaggaaggaaggaagtcaagcagagagccaggcattcagatgagcctacttcagacctgggcttatttcttactagacaggcaatgtcagcgtcagacaggtaacttgcctcctctaagccaagtaacttaatttcaccgagtactggggctttgtttttgtttaacatgcagaataacattgatatctggccttagcttaaagctttttttgttgttgttgttttcgagacagggtttctctgtgtagccctggctgtcctggaactcactttgtagaccaggctggcctcgaactcagaaatcctcctgcctctgcctcccgagtgctgggattaaaggcatgcgccaccactgcccagctgcttaaagctttaaatgatgtcatggatgcatgcttggcccatagttatccttgactctagcagcagtttctagaatagtctattttggccaagatcataaggtcacaggaagtaagattgggcacagagccaaacctgccacttgtgaagcagaaaccactagtttgggtttctcagaagatgtctgtgtaaaccggttatacttgaccaaaggaagctgtaggtagatgtgcagactggaaaagagaagagttaaatgtgtgtcagttttacctagcaacaaaagcatagaatccacagagtaagccaagcttgtgctccatctccccctctctgcttagcatcattgagtgcctctgtgagccttctgatccgggggtttactcttatgcaaagtagcccaggagaggctgctgggaggcttccctgagcagtgtctggtgaggcaaggagtggcaaatgttccacagttcggtgatgttgctcttgttgtgtaaggagacaggagagtacttaagactgatgttgaagcagctgggtttctctgagggcctgagcctgtcttctgccctatgccctcttatactccttcccaggggctgcttcagcacctgttcccacttcccttgggatgatttgtgtgtgtgtgtgtgtgtgtgtgtgtgtgtgtgtgtgtgtgtgtgtgtttcccctttcccatggtgactccaaatcttgttctccctgttcacctcagccacagccaagttttggtaggagacgggaacagttctttttagtcttaaaatctccagggatcttttttctttaatttcaccaaattgacaattcaaagagcaagaaataatggagggtggagggtacctccagcccaggacatccatatcggcttgaaaaagggacctgaagaagaagcatagaggagaggggaggaggagggaaggtatgcatgccccaccctccctgctatgtcctccctctctgtctgagaaagtgaatcttgatttttagaccctgatgttaatgttctccaaggaaaagagcagcatggttgggactcaccaagcccatgtctgttgagttcaggcccccaaagcttaatgtcaaaaggaagagcttccttctgtaagcaccagatccggcgaggaaaagcaacagacatttgaagtctgttccctgtgtgtctgtgtagcgtaagtgtgagtgcatgtgtgcgtgcgtgcatgtgtgtgtacaggggacagccattgacattagggttatttatcttactgtccctctgttcctttaccttctttgtttttggtagaccctctttctgatcccagagctccagtgattaagttttggggtttccccatctccctcccatctccccagcagtagggatatagatgagtaccaccaagcccaacaaggtctgtggggatccagattcaggtccccggcttttcatggcaggcactctgctgactgagtcatcgccccagccactgaaacgtggcctggttgagcagacgatccgtggcaggcgagagggcgctggggtgatggtgcttcttcatgagttacaaagctgagacaagcagacaggctgtcgccagagagcgacaactaaactcaaggaggttttgctcactaaataaatgcactattatttcaaagactttttttttcatattagtgttcttcctaaaactctactttcttatttgtaaatggaataaaacacggtttgcctcataggatgtctgaaaatattaaataaaaatttaaagatgcctcatactctacaaatcacacacaaaagcctcacttttccattatcttttgagactgctctcagtcatgacagctctgaaacacggtaactttttctggttaataattagaaatccaatgtggaacataaggaaatttcctagttttctttgcagatctattttgtaaggtgaaagatgttggtggcctccttccccaacttaatgtgaacccagaagaaagataaaggcaaggagatagaatgatgaggtcatttagacatgaggaaacatagggcacccaaacacatggcctcagttatatgcatctgtgggtggcacatgcacaggggggtacatgtgtggaggccagatccccatcaggtatcttcctctgtcattcttcaccttaattttaaagatttacttttaatttgatgtatatagggtcatatgcacttgagtgtggctgtctacagaggccatagggtcctctggagcctgagtcacaggaggttgtgagccacctgagacgtgggtgctgggaactaaacctgggtcttctgcaagaacagcaagtgctcttaactcctgaagtatctctccagccccagatgctaccttagttttccagactggcctttcactgaacccagaggttttaggctagaatggctaggcacccagcccctaggatctgcctgttttcagtggtagggttacaagacccaggtgaactgaaagttcatactcatccttggccacataaggagttcaaggccactctgcccctcccccgctcccacccaagactctgtcccaagccccttcacctataaaattaggaaagagcagacacatgatacttgcatctgatcagttctaatgaggatcctttcacatatcatggtggacatcaatagcatgaacatgtgtgggagcaggccactgagttcgaggccagcctggtctacagaaggacttccgggaaggccagggctacacagagaaaccctgtctcaaaaacaaaacaaacaaaaagttctcaaacaacaacaacagcagccacagagaatctgtgagccaggttcaggttccatataaaagccctattatgtagactatgggggaaccatgtgaggcctacctttatcccatataagaatagggtgccatgacttgatctcctagtaggtctcaccttttaaaggttctgacagttcccacgttatcatgccagggaccacactcccaacatgtgagcctttggaggaccaactgaagccaaaccgcagcagcaactgtgacatttctaaagtagggtctgtgtggtaaggaaagaaggtagccgtgtttaaaagctaggaggattctttccagcatcacttgggctacacatttgctgaagacgaggcaaggccagagacgatgatgagtcgtttgggctcagtagaagcgtgagcaaaggatgcagcgtaaggatgaaggctgcaggggaaccggagcatcttggaaaatgcatcccaccatgtgagcatgcaccatcgttctagagcgctctctgttgctgtggtaaacaccatgccatacgcaacgtggggaggaaagggtttgtttccctttccttccaggtcacagcccatcactgaggaaagttagtcagggactcaagaaagaaatgatggagtaaccaaggctgcttcctggtttgatccttagctcattcgggtttgctcatgctcagttagcttacttccacagcctagaactgcctgcttacacactgtccagtgggccggggctctcctgcatcaaccaacagtcaagaccaggccccacagacatagagtctgatctagatagttcttcatctaggttctctcttcttctaaccagctcaataattaagtgtgggtggaagggcactagtgggaaggccagaggacaacctttttctcagggctcattctctcctcccaccatggattgtggtgatcaaactcaggccaccagtgttcagatgtgcggtgagaggctgaggtggttgatggttggaaacaaagtgtatggcgattatgtatgatctttaatttctaggattggaaaaatggaagagagtagatcagaaagcctccccgtgagattgatatttggaaaaatatggaaatgaatatggaagacccattaccacttggaaaagaaaaatctaatccctggaaactggcctatgtttcactaaatagacgtagcaaattaccgtaatataggggacatgcaagaaaggtgattaagaaatttggccatctctcatagaaatagtatattttatttcaacaagagattgagaaggtttttagttataagaatttcaaacagaaacaagggtggtaaatagacttgtgggcggttactagtggtcagagcttgtcagtaattgggggtgggggaggggtgggggggggttcctttctctttcccagcaacattgtcgctgttgggattggaaggagcaaacctggagagtctttaattttactgtaggtacttcagtctgaggaaggtttagggtgggatctcccacggtgtgctttaaagtgagttggagaagtactgattgaaggaggagccgtagcacttcctggctagctcatgctgacaaaagctttgacgtctacaagggtctgccttttccctgcaccgtccatttatcagcaacttgggaggaaagcctagaaggcacaggtagcaaattggccaacaacacgaagctttcagtgagactgccatatattacagaaagaaataagttgcctgtaggttgaaaagatgggctaaagagaggagctgacattcaagggagctcatgaggtgagaatcctgacttgatcacttgtcggggaagatctgaaggttatccaggttcaaatatctaatgtgtgaaatgcacagtcacattgctggtaactttcagtttacagataatacagtgtagtaaccgccttgactccgtgaccttcagtcacagatgcaggatttgacgggtggttaacgaactggaggacagccaccagagtgtcactagggtagcatataacctgaaagtcatgactcatgaactgggtttattttttttttttttggtttggaaggcaggcaacttgaggcacacatacgtgctaccgttgaattcttgaaaaaaataatgaaaaatgaacacactgtaaagttgcttgatggtctagagttggatccatgaaatttagaaggaaactgaacttggatcaagaccagagcttcctagcagttacggtagctattgttagcctgggtgactttgaacttctttgtgtcccatcgagaagaatttactgcagaggttaaaacctagctctcaagaactgtacagcaacaggtttgtcctgcagcagcagttggactaggtcccatgtttgtaacgcctgccactcattagaatcaactgggggtgctaagtatggccatagtctggtccctgcactgagagctcagggtgattgcccgggaaaggactgggaaaattccctggctgattcttctgcgcagtcagtgctgggaatcactggagggagtcaactccgaggatcctttcaacttcaaagaagataactgtcattcgtgggatgtcttaaacgtctgaatggtggaaagcctcaccatggctgtaaagtcaggaagcacttgagctcaggggagaacagaggaggctaaaaaggtccagagccaagcagagagaacccagaaaaggtacctacctgtttgaccaactactggaatgaagctctgtgggctggcagagaatgagcttgactgggcatgccatcctgggaattttgttgggatgtgagccttgcattattacagccaggacattgctggggagactgagcccaacatagcataaacccccatgggctcagaagccagcagtgcagggagtctccctgtcccggtgactttccttgcagtgtgaacctgggttgtgtagctgtctgcaagcattaccctggtgtgatgtggtgctccaaggcaagacaccatgttccccacaactgttggtgccaatccaagagccttgactactgcttggaccagctcacttcttcccagcacgctgtgtgggggtcacatgcttccgagaatgcctttccacatggctccctcccaaccacagacgaagcccccaaggtgatttgaagctcttaactttgaagagcttcttgtacctccccacccgatacttcagccttcctgccacttggatgaacaatgcttgaagtgacctcagtaagctcactggcttcgggaaagggtaacggctgccttttaaaagtaagccagtgatggctgagaaattacctaataaggaactgatttagaggcatgctgcccttacaaaccctcacaatttcttcttctaaaaggagaagtatgggagtggcttgggactgtttacaaaaatagggccgagaatacccctctgaaaccgcagggagaaggcccatactgtacttcaaaacataaagtggaaatttagcagtctttgtccaccgcacttctgtgaggcgtcagaagccccctgccccacccctctctatacacctgtctctatctaggtttatgcagctctttttaggtaatgtctttccacatgtatagagataatatacaatacacaggcattaacttggggtggctatgatgtactctgatccgggtggttctcagagtatggtccctagaccagtgtcaccatcatcacccgaaaacttgtcagaaatgtggaatctttggcttcacctcagacttgttgaatctgaaaccctgaggagctggcagccactgctcttctaagcctttagatacgctcggtgcagggtgatggctgagaactggattttaggacttcatctttagaggactcttcagaggaagggttttctagggctcaccttctgacataggtctgaacctggcaaactatgagcgaaggacctccatcccgatctctgagctgggttaggggaagagttcccatttgtttgataaaggagttcatgagactgaagatgggggatatatataggaagagtggaattagaagaacaaaatggtggccaatccagttatttcatgttcttagaaaattagaacaccagtaccaaagtctctgatattactaatacagagctagacgcagagggatttaacatggcatgaactggtgttttaaatatattgtattctgtctcacctcagttcgtaggtcaaagctctgtgttgactggacaatagaaatgttgaatttaagaaagtgatttgaggggctggagagatggttcagcagtttagagcacttgctcttcctcaggacctggattctgttcccagaacccacatgcctgttcacatttttctttaattacagttccaggggatctgatacccactgaagtcctctgggtcaaggtacatgtggtacacagatacacatgcaggcaaaacacccatacacataaaataaaaataaaatataaaaaaggaagtgatttgattgctaccattttaactagtttgacttttttagtaaggaatcacagagattaaaaaatgtacaaagaaagccatcaggcattctaatcttgatagcagctgaatcagtgatgacaggaacagggaacacagcgggcggctccaagcactgctgctgtatgcttggccctgggagagagcaggataaacagtcacgattctctaagcagtgaggatcaaactcaggaccgtgcacatgccagacaagggctttacttctgacctacatccgggtcatcccctggacttgtttctgtttcctcagtttcccatttcctttgacaagcgattcccagttgtggctgcatattcaataccccagggagttattaaaaattgccaaaggccaggccttagtctcagtctgattccattattttgagtgggaccctagagttggtggttttctaaagttcttgcttgatgaacctattgtacatcagattgcttcagtgatacatctacccaggggaaagtattagaatagcctattctctgtgaagaagtttagagtgttgtatggggtttagagacagaatatctgaagagtgctccgggaggcaattttcagcttgaatcttgagggaagagtagacaacagttaagtaaagagattgggagatgatattccatgctgagacagcacattgacaaagacaacttggtgattcaaggcctgagaggtgacagtgaaggattcggggtaacgatgatgaaggctggagcctggggtgggtcaaacatagacccatggctgtattgagcgccttgttctgtttttataagagcagtggggagctatgctgtgttctgagaagttaatgggttacgtggggacagatagacacttgggaagggttacttcatctgcaactggaaatcaggctgttgaaaggcaagagtgaatgcagggaatccattatgggctcgccctgggagggggctggcgccgtggttggaaaaggaagcagcggaatgatgaggagggatccacagcactgacaccgttggcaactagaaccccggatgtggcaaaggacgatgcagcagcgtccactgagtgagcaagttgtggggctctggaggtggggggggggggcggggagnnnnnnnnnnnnnnnnnnnnnnnnnnnnnnnnnnnnnnnnnnnnnnnnnnnnnnnnnnnnnnnnnnnctctccttggtctcagtagctggatgaggaatgggaggctcatggaggagcagacttggtaggaacaagcctgagtcttgtgtgagctgggcttgaggtgctcgtggggattccaagctgaaaggacaagggagaagcacaaaagccagaatgtatctggacggcagacagagtgtctcctgaatggaggaccacagtcaacagggttgcacaggttctctgtaaccacctctttttatataaagcttcttctgtcttcatatcaacctatcaaaaagcaaggagtggctttaatcttttagtataaaaataaagatttagaaagatcaagtaactcgctggtaagagaagggagagttgggagtcagtccagcatgtaggcatacataggagatggcacattgctacccaaactgtcttcaaccggatgactgactgttcagagctgaagcagaattagccatgcttgccaaggagtgaccagctacaggggcggttccctccgtcgcacacatggcattgagtctattgtcggtaattcattgaacaacaacatctccggtggagtagatgactaagccttgggagccaggtttgggatttactgctcaaacatctgacctcctgcagccaataaaatgcacaaacgaagttctggcttgcatggcagctcactaaaaatagaacctcagagtggagaagttaaaatatatttgggatgctcaaaacaatctttctcccttttctatgataaacatcgcacactaaaaaagtccaaaccagccttatcccttcatttatcctcctgacaatgggacactgatgctggccagaccctttgttgggcactgggcagactctcaaggtgtccagcctccaaaagagactagtgctggttcagggtcgctgtagcactgtaggaggatactctgagaggccaacaaataagggcctcttagaaccatttacacataagcaactttcccagtctcagtatcctcattgagacagattttaaaaagagggggtggggagagaatgtttcagacagaagatagagcaggaatgatttttacaaaacacacacatatgtgtgtgtgtgtgtgtacatatacactccacaatatatatatatgtgtatatatatatatacatatatatatatatacacacacatacatacatatatgtgtatatacatatatatacatacatatagtatgtatttacatatatatatttcaccatatacagacagacacacacatatatattatatatatatatatatggaaaaaagagcctagtttcagagcctaacatgttaaatttacctcacttctatagctagatggttagaatagccttaaaatcattattaaagaatctggatttagcaaggtgtgatgactcatgttttcagtccaacaattaggaggcagagagatggcccttggtgaattcaagtccaacctggtctgcatagtgagttccaggactacaggtgagactgtctcagcaaaacaaagtttgggttttattttgaagctttgcagttttaaattgccatgatggcttaaaaaaaaaagatgatttggaaaaggaattgcattgaactggaagagcctctatagaagctgctgtaggaattcacagaagaaatgaaaactggttttaagaaatatttagtgagaaaaattttaaaaaaaggaattggaggtttgaggaaaaagatgggcactagaaatatatagatgtaatagattttgatgactacattctgtaagaaagatttagaggggcgaaagctacattcagacattcaagcttgcctgtagaacaccgaggcatatatgtgtgtttgggtggtggtggtggtggtggtggtggtggtggtggtattatggaaccacagctccaggaaactagcctgggctagtttaccaggggtcaaggccattgagactaggaagttgtagtcattgacatcaagttaccccatagagatcgaatagccatcaccactcagtctgggtcatgtttatacaatgggatgaaccagggtcccagcatggaattctctaggactgccattaatgggtatcaaatagagaaccagcaagcagagactggagaagtaggaggcttgtcagaatagtctggtatcatggaagcccgctaagaaaaaaggtttaagtataaagagtcaatggtatcaaattaagtgctgaaatgtactcactgaatttagcaacacaagctagtgggtgatatttatgtgagcaacttggatgcgaatagaagcggatgaagcgagctgaccgcgtctgtagaaaaatggagtttaggaatgcatagtctgaagaggtaaaacaaaagccccagtcatgagaggagttggagttataatcactgccagtgctggagcagcaccatataaagctcggaggggcagccaccccgcccgactcagtcccgggagaatgggaaagggtggggtccagttctgcctttgacatccaagtattgtctttgctcactgtcccagccttaagggtgacactcccaatttgtcatcctaaatgtcagttctaggtaacagatattcccagaaggtgcaatacaattctcctcttctactcatgcatgtttcttatagtcgttggccccttaggagtctctataaagaatcccaactattttggcactcatttctgagtatcagaatctgtgattccctcagacgtggttatcttgagtctttgctaaggtggagactcatttccttccactgagaacattatcttcgttccaaaggaaagaataaaggagaaatcacttttgtgtctgttggccctcccaagtggacttcctggtctggcacccttcctacgtctgtgagcccaagtaaatgaagacacaggcacgccagcgtgagcaagaagcacagaggtcgagctccctgtcatccatgtcatccctgtgctgtcatttcctggccttggggctttagagggacagaccgtctgctgccctttgggaacagacagaaagagaatgccctgaaacctacatttgaaagacagccatataagttgtagtgaccattttattattaacaacggccagctcggtatcagctttatagaacaattgatgtggtcagggatggagaggagacgcagcagttaagggcactgccgctcttccagagaatttaggtttgattctcagcatcctcacggcaactccctcaggccatgctggagatgcactgacaggtccttttcgttccacaccgttggctccatccccatcatgttcatacactgctttccttatctaggctatagagaacagcagtagggtaccactttcttagttatagtctagattagataaagtctccaagacataagactgatcacatcttctcttcttaggtgtgggcaaatgtggtagaagacattctcatctcttctattggtttgttaactgttgctttcaggggacattcctcggggttcagagtgtaactcagttggtagactgcttgcctagcatgccctgggctcagacctcaaaaccttctcaagtgggtgtggtggtataggcttgtcatcccagcacgggagatggaagcagaataatcagaaattcagtgtcattcttaactacatacggggtttaaggccagcctggcttagagattctgtttcaaaacaaaacaaaacaaaacaaacaaaacaagatgactatcaaggagagaacatatctggtatctcaggtctaggaattaaggtccaggaaccttcttctaacacctttgccttcctttcaacaaaatggatacaaaaaatatactccaaaaaaaaaagtaaggaacccttatatagtccttctgagttatcagttatagctattatactcttgaaaggaaggtaattctaaccgataaagcttggagctcttgcttacctaattgctctggtgctctggccgaagcgtgaaaagttggctgcttaaatatgcttgcccgtgatgaaatcaccaagtacagctggaagcctcaccatgccttcctagaggatcattcctttttactctgattctcaataccaatgatgcctaaagggacagtactgatgccctcttaaaccttggaatccatccaaaataaggtctgacagttccgcctgatggtatagaaagcatggcattgttctggaaagcctggatgaatgagaatcagatgtggctgcttggattaattggactggccagtgtctgctggacaatagagtaggcagtcagcaaagtccacagcagaccactaaagcacggctccccgtttagccattgttcaactgccttgctcattgccacgtgactcacactggcagccctctggactttcctcattatttcaaaacctttggatttttcagaaatttctattaagagttttaaattgcttaggtaattaaggatggagagaaaaggacggagggaaataagaaagagaaaggcatgtataagcattggttggtctgtgtagaaaggagacaatgaggtcagagactgccatcctcagatgagccttcttgcacaggtaagccttgactaagtatcttggagattggatttcagaaaagggatggctttttctacctggattgagtgttcagtctgtttgttttggatccctgtgtaccttgtgggagcctggcatgggctggatggacagcccccagtgacagccctgggtattgggttgttagtgagtctacctggtagatgttttatatgcactgttacagatgtttgctaggggaaccttgtgcctggtttctgtcaggctcagttcaatagattttacttcatacctttctgctgtagcaaattatagccacgtgtataaccatatgctgaatcctataagcccctttagtgaatggtcaaacctggggtgttcttgggaaccctggcacattcccacttacaactccaggaccatttctcaagagctactcctggcagtggctagccttgtatacctgtccagagacgtgcatgttttaccaagtaaaaacagtgcatttacagttcccacttatcctccatataatgaagtactcagaagatagcttgtgatgagattcataggtataattcagtctgttcatgtctacatggttttatgatctctatctatctatctatctatctatctatctatctatctatctatctatctatcatagaatttatatggccagaaccagatgatggacctatagctgttttcagcctgttatactgaacaccctatccttgtaccttttcaggtcttcaagagtattttgagaggttaaatttctacactaaacttctttgatagatagtatctattgcaagcatcagaagtggcagatttttacttccattaatgtataagaagtgtccttgtttatataatccacaccccctgcccacgattttgtttgtttgttttgagacaaagtctcactctttagctatagctggcctgaaacttgttatatagagcaggttaacctcagccttggagtggtctttctgcctctgccataggtgttgggattataccattctgctcagattccatcattttccatgtagtttctttactgaacttttacttttagatgtacagctgtatggattttgataaatgtgtatatggtcgtctagccatccccacagtcaggataagaatattgctatcatctccaaacgtcctttgtagatcctcctcatcagcctatgacccctgtgcactgattcgtgctcctaatattgcctttttgataatagagtaaagtcattcagtttgtggccttttgagtctggcttctttcactttgcacagtgcttgtgagatgtgtctatgctattgcacctaaccctagtgtattccttttgtattgctgagaataatgccattgtaaaattgtaaaacaatttgtatacagtcaccagctggcagacatttggattacttatttttttgttattaataaagctgttagacatatttagatactggtttttgcatggacatcctctgcacattttgggctaaacgcctgagagtgtaactgcctagtcataattctaatccatttctatgttgcaaatatgcatttccttttctttaaattacctattcgtgttctttttttaaaacttcttttattaggtgggttgatgattttcttaattagtttaatgactaatatactaggaaatatactatttgattgtgtcgaaaacaattgccctgatttatcactttaaattttttacagtgtattttttccacattaatatttttgtgcaggctctgagtttgcacctcatggctacaaaaagtgaggcaataagataaaagaatttacacacataagatagatgttcatgcaagttctgctgttacctaaccagtatagtctttcctagtcaatctctctctctctctctctctctctctctctctttctctctctctcctgttggcaaataatcacagctttgttgacatttgcagctgcttctgggaaagagttgagtccccagagcacaattgtttgatttcagatgtggagaagattttgtttagtagagaagcaatgtgcagagattgttatgccttctggccaggacacagggaattccagtgtgcagactcagtgacatcactttgctggaaacagccctactccctgccaactctacccttaaacatggggattccgtgctaatcacaaaggccttttatgttcagtgcaatctgtgggcaaatgaattcaggggaagccagaaggagagtgggtggcgtggtgggaggaagtgaggaaaagagcaaggaaatggaacgcctttgcttccttgcgtcccccacagaactttgtctggtttttgtagtcatttgcagttttggagtcaggtgcacagagtcagtgacagtggctaattggagaagaacacaccatgtaggagtgggcagactagagtccgctgagcctgctttgcagtaagactttgtttctgcacccgacactccaccccactgcctgattgtccctagatggcctccccagccagagctgatactcagagcatctgtcatacgaggttgagataaatacacttcacttccaactaaagaactggtgagtgagaagaatcagataattagaactcaaacatagactggtggttccttctctgagggtccaagagatcagtaggcttcaaccctgcaaagcacctcacacagttaattcctcagtgcctctgtatctcctttgctgtcctcattgcctccttgctccttcctgtatattctctctctctctctctctctctctctctctctctctctctctctctctctctctctctctctctctctctctccctctctctctccctctctctccctctcctcccagctcactctcatcttgctttccatccctattctcctgccttctgtctttaaccagctgatcatagctaagcccctaaagttcattttcagtggaatctgtactgcctccatgaagcaaaacttagacaggaaaccccaccaagttaactgcttcatcctcgaaccgagtgtggactggttgactgaatgaaacttgggaaccaagactggatgaagctgggtaatgcctgtaggtttctggtgcaggaaggctgttggaagcattggagtggagtcaggagactcagggcagattcctattctgccttctataacatgtatgacgaagcaggttctcagatagtcttgctaatcacagtctctgccactgacctgtacgcttcccattgtctggatggaggatgccgcagtagtgaagggcagaacattggagctcttgtcagagctgtctagacagttctcctatcattgccggtgccagccacttccattcccgaatgatagaacttgctactctatatgacatgatgtctcaaaaactgtagagggtgttggacataggatctctcactgaacccggagctcactagttcagcaaatttgctgtccagcaaacttcagagattctcctgtatccacacaccccaatcccccatggtagttacacatggtagttaccactacactgtgcttagctttcacgtgggtgctcctggtttactcaggtcctcatggttgcatagcaaatacaaaggattcaaggccacccttaagttctccatagtgtgttccatgatagccagagctacatagaccctgtctcaaaaagaaaagaatataaaggcaaacaggccaatgattgatgtaataatcagacgtaattagagaaattcctgaagtgtggtgggcaaatacacaggagaaaaggcaatgtgaagagttagacaggaatctgagtgatgcatctgcaggccaaagggtgccaagagccctgaggaagtggagaaatcagagaagcatctccagggccgttgaggggactaagaccctgacaacaccctgattttagactctatccttaaaactgtaagaactttttgttgttttaagtcaagcttgtggtcatttgttgggacagacttaggaaatgtatcaggttattatctaccagttaataaaaatatatcttctcacaggattaagtgaattagtttaaggtaaagggttaagacccatatctggaccccagagttcttttttttgtttcttttatttgtttgtttgtttaatgtatatgactgctctatctgcataaagagcctgcataccagaaggcagcatcagatagttgtgagccgccatgtgatttctgggaatttaactcaggacctttgggaagaatagccagtgcttttaactgctgagccagctctccagccctaacctcagcgtttctaagtgtaggttgtattgtgagctcactgcactttgcatagcaaccacatgaagccggtgccatatcactgcccatattgcacacgaggatctagaagctcagaagagccacatgggcaagcactagcctggtgtctctctagactgtggagttggtttcttgctggtgaattctggtgactttaactccagctcctcccaaggatttggtcttagcgaggtgcagaagacgttaagactttcttagcatgttttttactcctggatgtacctgactttttgaaacaagctgaatctgatagatcctggtctgtccacacttggctgtgtagttgtcctatgatctactgagataggcttatacacttaccgagacagaaagcaggaaaatgtgccctacatgactatattcacacaatatatcctcaagctccaggggcgtcagtgacccttgatgactctatgtttacatctaaactactgagaataaatcacaccaggtactctggaatcagtcatatctttcaggccccatggacctttaaggtctagtgagcaaagctgcccattacccctctgctgtctctgtcctttctcctctcatcgctcttccttccacactgccctcctgcccaggcactggcctgcctcagaggtatttcatacacagctcagttgccacctgtgttcctgcctcagaggtgtgcgtgttgtctcgtggtcctttcattcactcaggctcatcccaaaggccgtcctaggttgacccatatctctctctttgtatctttatagcacttataattacataattaccttccaaatattactgtttggtcctttttattcttccaaactagaatataagcttcatgaatgtggaacatttatgtgttatattcactgctatagctcaaagctacaggcaagtctggctgcatagtgcaatgtgttcagtaattattgaacacagaatcgaaaggctgtcaaggcacagcctccagttcaacagctgttgaacttgaacaaaaatggtgtagctagaagtggcacatgagaacagaggcctgctgggcccagcgagttgggtcagcagggaaagacacatgcaaccaaacccaaagaccagagttcaatccctaggacctacataaggaagtgatgtatgcaagttgttctctgacctccacacatgtgccatggcacttgtatactcataaacgcacatatatatatatatatacacacacacacacacatacactcacatacacagatacaaacacagacacatacagagacacacagatacatacacatagacacacacacacatacataaacacatacagacatacacacagatacacacacactaaacaaatgtgatttaaaaacaaaaaaaaataaagatggaaagaaggtttggagaggagcttaacctccacatgagtctgatattgaggctacaagaaaagagacttggggaagaatgaggagactccaattcgcatatgaaggaaatgttacattgaaaaaagatctgagaatccaaaatttactcattcatttaccaagggacacatctatgaacagccagaatagtttcagccctcagggagtacatgccactgatagggacaagaatatcagtcattctggtcttggccatagtgggcagcagaaagttcagttagattcttgatcaggaggagcctgggttatggaagatccctagagtcacccaaagcaaaggtggattctgacagggaagggagagagtcaggaagtgtgggggtctctggaaagggcttgtgaatcagatgccagatggaggtgtcaggaagtggccatatccaaggggcctggtacaaagcctgcaagcatgactgtggcctatgtgtgtgtcctctgacagacagccaggatagtgacggagacagtgaggaggctctggttcaggagggagggactgagacctcggtgagcatgctgtccctggctggaaacacaggccacctccgtgtgtctgtctcttgtctgtgcttgcccacgggtgctgctttctcccattgacaagccagggttaccccagatgtggcctccaggacataggatgcagttcccgtagtggctgggatccacagaggaaacttttggtcacctttgccagagccccaccacatctgtcaacatgaaaaagctttttaccgataggaagaaacatttggatgattatatatttgttatcatgtaacagagaccctaagatttctctttacagtggcattttgattaactatgattttttttttaactaaataagattctaactgggcaactctctggctatcactgtaagaattgaagtagagatttttgcattttgttctttgttttttttgttttttttttcctgtagcctattgttttgacattagtccatattttactaaaattgggcttctttcagctctttctgtaaaatgaaggtggaagttattacttgggacttggctctctagtattaaacagaaaacctgtttctctgtcacatgaaaggaaaaaactgtgaagaaggtgcagctttgaactttccagtataatcaattccaagaaaaaaaccaaagcaactgttgctggaatatccaaccccaataagcccatataaaaaacactctatccaattattatgattataatctataagcctagactgggtagatgtagcactatactaactgattctctagctataagacttcttgctacttgcagtttctcctggctatgtggttctgcttcataatggcttcctcctccagttctatcctctctctttccctcttctttctctctctccacctgtcccgcctctcaaaggcttccagtcccacctttcctgtctactgcccaatcacaggctctggcctttactgagcagctgaaatgggaagaagattcacatgagatcccctgggtatgtgacctactgcttcttggcaactcctcttgaggaagcagaattaacatcagaatacaaacagcatcaggacagcccacaacagcaacactttgtgcttggataatcttggttaaaaaaaaatcattccttggacttttacaaagtaccatgttatgggctgggacatagctcagttggtagagtgcttgcctagcatgtataagaccctgggtctggtccctagaaccatatacaacctgtaaatgtcacatgcttataaacctaactctcagaccatcacaagagaatggccagaagttcaagggcatcctcaacctcacagcaagttcaaggccagcatgggctacaggagtccatgtctcaaaaaaaaaaaaaaaaaaacttataaaaataaataccactttatgttgagtgatggaaactgcctctctgttacccatgagtcaggtgaggctttctaagcagaagagagtcggtgtcaattttcataataaacctgactgttttagtaaaaccggatctgagagatctagccaatggcgcgagtggcaaaggtggttccccaaacccttttccccttttcactcttggagacttccacatgctgagcagggaggggtaccctgcagcctgtgcttcccttttctgccagcctggccctccacagctagcaccacttcctgtgaagtgtctggtttcctgcctgccagcagggcttttgagaagtctgtgagagacgcagtagttctgtttactcctatctgggtaatcatatgaaaacctaacagccatatttttggtagtaaagaattttaaagttacatgtagaacatttatatacttaagttctctagcttatctttaataagaagtaaaatatggcgaggggcttgaatatgtggtagaaacacggctattattacaagggctggtcagctgtgggaagcaggccacctgttcagggatggtggggattagcaagtatttgcataggagaaggaaaaaaagaaagccaaagtcacattaaggtagctaccaccttggggcttctgcagtccccatgccttccttctggaatgttccattccccctcacagctagtgtttcaccatcacccagttcttagaagcatcagggaagtcttcttaacctgtgatcgaacactgccgacctcaagcccagcgctgcagcaatcaatggaccagagtccttggctttagtttcttcttagtgttttcatgattgaagtcatttactcatgtaatctctgttttggcctctcccccctctctcccccctctctctctcctctctctctcctctctcctctctcctctctctcctctctcctctctcctctctcctctctcctctctcctctctcctctctcctctctcctctctcctctctctctcctctctctcctctctctctctctcttctcctctctctctctttctctcctctcctctcctcttctctctctctctctccctccctctctctctctctctctctctctctctctctctctctctctctcctctctctctctcctcagtgaatggctggctaattccaaaaagcagacatggtgttaatctcttccatcgtagtagtttagctactaagaataatgcctgcatagatgccataggaaaaatgagtcggcaaaaattgtcattcgtggagaagaaataactagatgggtgtccttttcagcagcctcaggaatggaaaaatacagcatttaaaattctattgctaatgacatagctacgaaatgctaccgatccacattataaccaaccatgcagagtccatacttggtagcacagtttcagtttctcggctttgggactgaaggaggggaccactcacagagatgtctgtcctgactcccagactctagagttctggcattttgacattccttcttccgtagcagctgtacctgggtgtttaagcttcaggtaactaatatcctggcatcgagtcaaaggataatccaatgggaagatgagctgagggttggtcaatttggcatctcaaagtgaccctgaggactcaggatcccccatctctcagctgccataggtgtctgacatttcatccaggcaggacagtgacaagagagagtgtttccactttttcactagtcttgtgcaagcagacatcaggttgtaagggtccatagttaggtatccacccatcatagaaaccttttctcattgggacgtgagatcacacaaactgagcaagtccatcccttagcttgggggaggcaggtctcttcatagaagtgctatggccttcacttgcccttccttcttgggaagtaagagacaatgctttattagcattttgtcttgggttttgaacgtttggcttgatgaatggagactacttgagaactctggggctctgtgcagagtaggcagtcatgtcgtgggtggcagacttttgggaaaagtccaagttcctgctcaagaccataaggtagacttcccatgtcaagaccataaggtagacttcccatgtcagcacctagcctgctgctgctgacaaagaaatgggagagcggggacacttgggccactctctcctctctcttgatctcactctgtccacagagaagtgtaaaaaagataaagaacctatctcattttcagaccattcagtgttatccgccctggaagcctaagaaacagtctgaagctagtttgagaagttgactgaaatacaagctgtgcaatcaagatggatggactgagggaaccttccaggccctagtcccgagtctctggatgatctatttaagtccagttgaagtagctttatgtaattcttctagtggagcttttaaaatgttctctgtcatgtaagactaaaaccaagaatagattagctaatagactgacagccaaaagaattcagagctcctcaggattaaggtgactgtcggttaaggtgattgtcagttttccatatgagggcgttaggacacaaaagttatatcaagccggaaagtgttattcgggggtgggatctgatgtgtgatgtttttagcaaattaaatgctttgtgtatattttaaaaatgcagaggtctatctgtcttttgctagttgtttcttgtcttttgattgacacatctgatctattagctaagacacccatgtgattctcctcctcatactgctcatgtaagtgctttgcccattgttctttgcacaccgccaacttgactttggtcttcatgatacagacaaacctttttaattcttaaattatctccaataactttcaagtatcttgtggatatagataggcttcttattagcatctctggtgtttctgggcagccatcataaaaccagacaaaaaggcaagaaaaatcattgtttgctgatttcttattcatgttttgtttttgactttagattctaaggtgaagagattttgctccaaaaatattctgatcatccttggtttcacctctatcttggctgtgatagctttgattgctgtgggactgacccagaacaaacctttgccagaaaatgttaaggcaagtaaaatcacaaacatttgcaataccgttattactttgttttatcttttaatttaaaaatgtgatacagaaatctatatataaatatataaataatataaataaaatttaaaaacatatattttacacttaaattgaaaaggcaataaatatatctatatggggcccacctcacataacgtaggcacactggtatatatgtcatgtgggcagtgacatatgcagaaggtgacatggctgggaggtcctagaacacacattttgaagtatattctgcttgctgagaagatgatggcctatgagcctggaaaatcagacgcatgccctgtttccgaaactgccgccacccacgccgcatcacttgctgtgtagaaaaggcgtgggtgttccgttggcctctgtttgtcacacaaattcattccagttgtgctgtgtacagcggccactttgtcaggacagaaactggctggcgccagctcagtgatggtggtctcttgcttcttagtgtttagtggcattggctctctggcaagacttcactcgcactgaagcctcatgacatcttggttttgctatttgtttaccagccccagaagcaagtgatcgccttctcgagtgacctttttgcatgtctaggattgcatcactggggagaagggccactgaggaggcacacttgagctctgtgtccccagtgtctgctgtggtcagggctggctccttcacgtccagtggtctgcaagtttactgggcttctgttttgttatgttgtttggtaaaagagagccaggtctttgacactcattaaatagaagtatctcaagagcagctactaccattgaagtggatgcggtagtattgctgatttattttgcacaaagatagttttacaacaaaaagctgaccatttgttaaagttaccgatttcagtaagatatctatcacatattgggaatgaaacattgcacagtacagagagatgaccaccactgtagggggtctactggacactgctgctttcgagtgtactctcagaagacatctctgaaatggttcaaactttagctgaatgaatatggtgtacaagacaatgtattataaaatctaaaataagaaacaagagcaggaccatttctattgtgtgtgactcaccacagccttctagactatgtttatgtatatgttgctaagtttattggtaggaagcacagttggcctctagaatctttgggggattggttctaggacacccaccttgaatatccaaatctgtggctggctagtcaagccttttatggtacccaaagggtaccatttccatataacctatttcaggctctgagatataattcctgtatgttttaaaccatctctagattccccatgaagcccagtgtaatataaagtctatgcaaatagttgccatgctgtacttactgtttagggagcagtggcaagaagaaattgtacaggtttcacatgaatagattttaggaaatgtattcactctccatttgcatattttgctctgccatctgccatatttggttctgccattctccatgaatggagaacccacaggcctgcagaggattgtattctcttctcaaatgaccttagaaaagacagcccccattcaactatttgtacacggactctttgttttatgaagatgagctagcattgttttatttctgcttgccatggtttgggttcagtcttgctgaggaggtggtggctccatgcctggagcacatctggcataccacagggagagcactttatcgtgctcgcacacttacttggatattcagttctaaacagatggaagacagggactgggattcgcttgtctttgcatatattttatgtactcattcatttaataggtagccattgaacatttactctgagggtctggagatgtaccagtgagcagcactgggaaagtgtatgcatttccgtggggggggggggnnnnnnnnnnnnnnnnnnnnnnnnnnnnnnnnnnnnnnnnnnnnnnnnnnnnnnnnnnnnnnnnnnnnnnnnnnnnnnnnnnnnnnnnnnnnnnnnnnnnnnnnnnnnnnnnnnnnnnnnnnnnnnnnnnnnnnntgcaagtgttagcttgcagccagcctggcccaacctgagagcggatgctatataggcatgcgctgactcagcaaagcaaacaggatctcaacagaaaggactgcgcccttcttggacacaggcttgtcagtgtaggaggcagacgaccagcccaggaccctctagacatcctgtttaccctcagtgtgaatgttcagaatgaaggctcaagaatctatcttcaacagctatcctaaggcattctcttgccgcggaggtcggagaatgactatcagtactaggtggtcacttttagatgagcggtccatgcttctgaagacaaaggctttggtggagtggacaggcagtagtgatggacaggcaatagtgatggacaggcagtagtgatggacaggcagtagtgatggacaagcagtagtgatggacatgcagtagtgatggacaggcagtagtgatgtctaatgttgtccttggaaaagtgcttttgtctccatgggtctcggtggtgctttgagtttttactctgtccaccactccttaactccctgctcataagtggatgctggttgttgatatgacttttagcatggacattccacattttgacatgcaagctgaccctataccagacagcaggcttgctttcagaatgcccctactgtggaaataggcagggtgctttcatttcaattacagaaacagtgagcgtaagcaagtcaattccttcctccaaacctgagttccctacaggtcaagtggagatagtaataacacctacttgatggtgggttgggattaaatggagaagaacaagcagtggcttgtcagagaatgtcacacagcagaagctgagtgcagtgggccactgtcaacatctctttacagcggatacactccatggaagccccttcgcccgtagcatgtttcctctccaatacgaacatgtttggaactgagtcccatgtgggtacgccgggaggtggggcctcatgggagtgttcaggacatggggatgctactttccccatggtttctgagccaacactacaggattcctctcggctgctgaagggtggtggcctttcccaaatctgcttttccaaagcagactaaaatgatcctctggaattagcatttttgattctctttttatggagaaattgaaagaatttgctttggcttgcacacataaacgagcttgaaaagcatctgttgttatttttactttactgtagtttaacattttccattttgaaaagtggcccgtggagatggatagtgatcccggttctacagcagtgtggatgtaattaataactactagatggtccactttaaaatggttcacacaatacatcttgcgtcatgcatattttaccataggattaagaacaacaaaataagagtttatattcaggacctagtgattctaactaaaggaaaaataaagaagaataaatagtttctggatgtttatcgtctccactggcatctttgtggctggcggcgcctgtttatagggtattagaaacacattgtaaaagataagctttgtttataagcccaggctccctgagccagacccacagggctgcttaagttactgttaaaactacgagcactttaaaggggtgggggtttaaagatgcagtttttctaaaggggccctgtgaggtttccccggtagttagagtcattgtcccttttggactgctataacagactgccactaaagcataatttgtaaagatgggatatttactttctccagtactttctcttctggagactgggaagctcaaggtccatgaatttcttataagtgtacttcaagtctagcaaggacctaatttctgtttccaaactgacatcctggatgctgcactgtggccgggggacaccattcctcgtatgggcagtacattagagggttagaaaaagggcaggcacctccccaaagcccacttcattgggtcattaatttactcatgaaagtagcatccccatgtcctgaacactcccatgaggccccacctcccggcgtacccacatgggactcagttccaaacatgttcgtattggagaggaaagcattaagccaaagcgtctggttgtgttgtttagggtggggtgtataacccagccccaggctcactgctttagattatgggactgtaggtggcatagagcatggtggtttgtacagaaagatcactcactcctctgtggaaaatgcacactcaaaaagattggaaggaagtgaagatttggtgataaaagtgttagtaagaacatctagatggaatttttatttattttttttaattgggtatttatttcatttacatttccaatgctatcccaaaagtcccccacacgctcccccacccactcccccacgcacccactcccacttcttggccctggcattcccctgcactgaggcatataaagtttgcctgaccaatgggcctctctttccagtgatggccgactaggccatcttctgatacatatgcagctagagacaggagctccggggtactggttagttcatattgttgttccacctatagggttgcagacccctttagctccttgggtactttctctagctcctccattgggggccctgtgctccatccaatagctgactgtgagcatccacttctgtgtttgccaggccccggcatagtctcacaagagacagccatatctgggtcctttcagcaaaatcttgctagtgtatgcaatggtgtcagcgtttggaagctgattatgggatggattcccggatatggcagtctctagatagcccatcctttcgtctcagctccaaacttagaatacccaagatataagatacaatttgctaaatgcatgaaactcaagaagaatgaagaccaaagtgtggacactttgccccttcctagatggaattttaaatgtctttccccttcattttctttctttctttttctttttcttttcttctttctgagacagggtttctctgtgtagccctggctgccctggaactcactctgtagaccaggctggccttgaactcagaaatccacctgcctctgcctcccgagtgctgggattaaaggcgtgtaccatcattgttcagcttccctttcattttctaggtgatattgaatagattctagtactcttaaaatagaaaatactattgaaataataaataataataataatacacatattccttccttgccatcggaatcttattttttctttaatatgaaaggcattacttagccgtatatttagatttttagaaatgctttacctatgtgctacaggaaaacattgtttcttcccatggtcagatttccctaaagccatcagctaatgggatggtgagtgcaggaaggaggaggaagggacattcctcaaacttctggcaatgtacatttgctgaggtcctgtggccccttgtgtcctggaacatgctctgcggaatgctgtggtggtgggcagagcacaagctgggggctgtcgcaatccttggggacactgaaaccacaagaggcaaccccctcaagtgtgtagactaagcacatggactgtccagctttagctgttctcaaaatgtcaactgtttgttctatgagacaagttaggaggcagcacaaagcagccctcagcaggcatggttcacaggttagccctccagcacggtgcacgggctggaatgtcccgtaccaccatctcaaatacttccaaacaaatgtgataatgttttcatctctccactgcctcgctgtgtagggccctagagaagcaggccaacagaagcaagggcagcctgttggctctcctggagaggagtcctccatgttaacaaaaatagaaagaacgggccgtcctgattccagataaaggctgcttgctgcagtctctctagcttctatcatgagccattgtggctgcaacattttctggtagaaagaactcaggggctctgctaggggacagtggaaaatttcactgtgtaacacaagagcctttactcacaccctgggaggtttccctggggtctcaaggccctggaccccaaccagcaatccctccccaaccactgtgatcacctaaggcagttcctggattcccatgattcagagaggctgccctctttgcttcttgattgtactcagcatatatatgtatatgtgtatgtatatatatatatgtatatatacatacacacacatatatgcatatatatcatgatatataatatatatgtgtgtactcagcatatatatatatccatatatatgcatatatatcatgatatataatatatatgtgtgtactctgcatgtatatatatatatatccttttctttttgagcacatgaaactaattactaaagagatccccctccaatacctgcactgtgcataaggacacagagaacactgaggagttattggaacatcaaggatcctcaggaggtctgtacagggctgcctcctagtgaaacggaatgactttaggtacctaagaggctctgcctttggctatacctagtggccagggaggtctcttaaattctcactcttgtcttttctacctgtaagctcttaggtattaatagatgagacaatgtgaacttatataatataaatacatattacaaatatagtctttttttttcaagtggaaggccccattttgaactgcacaggcccaagggcaccgctgctctactttgctttgtctcgctttctcactagagatgattagagaacgaatgttcaagggctggagaggtggctctgatacagcacttgctaggtgagtgtgaggaccagagttctgattcccagagcacatacctgctggaggccacagcagcatgtctgtaagcccaccattcagaaggtggagataggagaccccagtagcaaactgactagacagacccagactaactgtgttggcaaccctgcctcagtgaacaaggtacttgagggagactcctggtgtcagccccaggcctccacgtgcacttacttacatgtgaccacatgcatgtgaacatccgtactcacaggacaccgcttacacttatgtaaaatcaaaccacatgtgctgtcatattatcctgatagagcccatggaaggcatcactaatcaaaccacatgtgctgtcatgttatcctgatagagcccgtggaaggcatcactaatcaatatcagatttatccccaattttgtgaatattaattgaccaatataggcatttgacagtctactccatgggagaaatagctttaaaagaaaaaaagaaaaagaaaaaaaataaagtttttattccataaaagcgaaatctcatgaatgtttaaagcagctatatctgtaatagtctcgattataaatagtccaaatgtctgtcaacattagaatgaatgaaaacacagtgacattacacctagtggctatgctatacgatgtccctttgctacagctcaaaacagacaaacgtcatctttggtgacaaatgtcaaagcagagattgcttcttggggaaaatgactaaaggagcaccaagaagcctcctgggcccacaagtgttctgtatttgatttgtctagtgtcgggtgggtgtgcactgtgcagaagtacactggggcttgtcctcacgtctgtacactgtgccagagtcgtccttgcatcctcatgtctgtacacagtgccagagtcgtccttacagatgtctttagaagggatctccacgatgcctggctttgtgctcagcccttgttccatgttccacagacaaggtcttgattctgaggctaaatcagactagatttattaactaccttctggtatttctcatctatataaaaaggattaaaaatagcctctgcttcttggcattgttctgagttcaaataaagtaattcacgtctaaaacacttcacacgatccatccccgcttggtgcatcatcaactcactcacgatacccaatgtggtgcctttggtcccgccctttttccctctaaccacctagttcatatttatgctgctttttcttctcatcttctgtgcttcaggtacacatgtatatatggacatgcctgcacatttgtgcacatgcatgtggagatcagaaggcaacctcaggtgacattcctccacaggcaccatccaccttattctttgaaatggagccctccctggggcctgggccctgctgatcaggacaggctagctgaccagtgagcctcagccgcacccgaggcctcgcactgtcgggattgcaggcacagcaccacgcccagcttctcacatgtgtgccggggctcagaggcctttgctgcttaagctgcccccctgtgttcccggatccccgatttcctcaactcctgcagccccctcctccctttaaagagctgcagacaccaagtgcatctgtcttaaaatatgccaaatacagctttacagtttcctgaattaaaaaaagcaagcctttctctctttaaaatagaattccacagtcactgaacccaaatcagttgcatacatttatcacatctctgcagcctctgtgggctagcccagtggttgccaggcttgtctgcgcattaggatcctacaggatctcatgatgctgctggtgagcagaccactctaaaccagcgtctgaggtgggacggggtgggggtggggtgggggtggagtgggggtggggctcagcctctgtagctctcagctgataccagggtgtggacaagtgtgagaagccatggttttctgtttctttcatagtctccactgcttcagcctgtgggattgatcccagcttcacactagaataactgagcatttcctaaatagccccacggctcaggcccgccccgggtaaggcccggatgtttctaaggtgcagccttatctagagtgatgcactgataacccttggcactgggggtggtcgctctagttctcagcaccaaatgttccacttagcttagagagagaattttctctttatggtttgaaaattcccacctctgtctacttcctttgcaagctaaatatggagaagtgtggtgtcgtgctaataagtgttttacatttgatttgccctcagtatgggattgtgttggatgcggggtcatctcacaccaacctgtacatctacaagtggccggccgagaaggagaatgacacaggggtggtgcagcagttagaggaatgccaagtgaaaggtaagacgggggcggggcacggaacgggaagagcgggccacaggaatgtgagaggcgtgaggatctgccgttggtattttattatcactgtaaaatgacactgagccaggcctagtagcacaggctggaaagcaggtggatcatcaatgttcaggccagcctggaccacctagtaagactccgctttaaacaagacacagatgtagctcagcggttgtagcatatgcctcacatgcatgaggccctgtggtcagtccttattactactgccagtagtaacaataatgttgagatcaattcttgaaaaataggcaaatttaaaaatagctgaaggtgtcactcaatggtattgtacaggcttaatattcatgatgttctaggttaggttctcagcaaaacacacacacacacacacacacacacacacacatgaactgagcaatagtagccctcgtcaatagggcatgtctgtgtatacttgtatcatgcttacagcaatgtatcatgaactcagcacacatttttcactctcatgatctggtaggtgagcagcagcagctctgtcctaaaaacaagggctgcgagataagacagctcatgccacgtgtttaaagttacttaagttggggactgatggatctggctgacatatccacatctcagccgtggttctcagacttgaaatggcctagcactacctggggtgggggttggtgggagctcttagcacacagacatagggccgcctacagccagagatcccaagtcaacaggtctgggtgggagcctggggctttacatttctaccaagttccctggtgcttctggtgggatgctcgacctctcttcttattttctattttcggctcagactgcaacctggaggaaaacctcaaaagcttttgttctcttcagaggcagagaagagtagatcacagacttttagggtggggaggggggcgggggnnnnnnnnnnnnnnnnnnnngggggggcgggggggtgtcatttaaatctcattttccagggaaggaagctgaagcctggaggaccctgtaagtttcgagagtccagatggtggtccaggcccctagccacactacaggctcccacagaagcactgctgataatctcccccataccccgtcccagccaaagtcacttttaacatcacacctggaggatggctgatagctcagctaccctgacttgctctccgccacgcgcccctgtgagctttgtctctgctggccttttgagccaagaacacactggctttttttttcaaacaggtcgtctagatctcaggagagacgtgacttttaatctgatggcgaatagcttccactgacctttgtaatttgccaaggaactgggcagggttagaaagagaaagccactctccctggaccctggtgtgccagtactgaggccttgctacgaccgaggcggtgctcatgaaggttctttcttctgaggatcatctcatgaatgcatgtgtttgaacccacacatacagagttagcagaacgctgaggtcagatttcctgaatcagaagcaagccactaacagagcttggggcttctcattatgttacacaaacaggcgtttaaaaagcccgtttgaataatcaccttgaaagcaaactcttggtaggaagcagtcgaattcacctcagggtaggagtcttggctccagtcctctccataacaaccgttagtttgctctaaaattgaaataacagtcttagtagggaggcaggggtaccagagcagaaaagactcagggtctgcagactctgtttctgtttattctaacaaaggaagaaaccccataaatgttagggcatactctatgacataactagttaatgacacactctgtcttttcaggaaaagccagcgtgttgggtactttccactaaatgccatctttacctaggccctctaggaactaatgttgttaattacagctctgtggaaaggatcattcaaaagaggccaacagagaacccactgtaagagctgcattagtgccagaggatgtgaaatggcaccaccttgtggccaaatcaatgaacaccaggttttaccagcaaaattttaaaattacaagatttaaaaaatacaatactacatatacatgtgttagctactttttttccaagactttaatgaaatacttgagagagaaacttaagggaaatagggcttatattggcccttgcttctaagggagacatgtccatcatggtggggaaaccatggcaacaggagctttgcagtccacatcctaactccccaggtaaacctctctgcaaacagcctcacagacacacccaaaagggtgccacgcccatccactaggtgcttctgactgcagccgctctccccgctaagaaatataacccaatgtacgccatgccaagaagcgtttcctcccattttcctagcaaacacttttaaaaaatatggtcaaggtagacgctccacactttttcttttaaaggttttcaccgactgtatcttccctcaggtcctggaatctcaaaatatgctcagaaaacagatgaaatcggtgcgtacctggccgaatgcatggaactgtccaccgaactgataccaacatccaagcatcaccagactcctgtctacctgggagccacagcaggcatgcgcttgcttaggtagagtgatatgctgggaccagcatgctaggagctggaggcggtgctgagatgcctgacattatgggacttgtagctacctcacacgccaagtcctgttctgggaaataagttttattaagtttttataatgcaagtttcaagtatctaaaagagcctgcctgtctcccttggggaaatcaaagggggcagagtattagagagaaagattttgggagttcacacactccaaaatttggggctgaagatagaatcaactaatatatgggaagaagaaggtgaaagaagacccaccaatgtcccaagacaacctcagctaacaaagctcggctgatcccccacccccatccccattaatatctgtgtgcattgtgtacattggatctagggtgatctgttgattagcagaggagtgtgcacagctgccgagggagcgcgtgggattgctcaggatggaaggtgggcgggatggcctgccacatcatggctgcatgagcagaggaggggcgcgagtcgggggaagggtggcactggcagaagtacagcgtcattcagttagacatcatttagcactgttatgtgccacggaaagtcttaggtgctggggctaaagtatcaaacaaaacagagctcccagcattgcggagtttgtgttctagtggatgtacaaaggtggggaaatgagaagccagggcagagtcaggattgtgaaatagaaaggagatgggggtgcagggtgcggcggggggcggggggagtaaaataatagaagctcgtgtctcagcgaggtgctaactacttaagaaacacactgcttagtcatgagggtcaccatgaagtgaagatataaattaaccagagagagaagctgcagtttagaaatgttaagaagccgcgaggctgggaagtggcagagctagggccacagatggcagggtctagaccaggaaatgcctcgtggatcctgtcaggaaggttggagaaatgagaagtcgtgtaaggatgcaacgcggttatcgattctggagggtggactggaacaggaaggctagggaactgtttgtatgagagaccccagctgccacttcatttcactcagagcctctccaggtttcagactgggtcttagaatagtcacatcccatcttaatataataaccctgagactcccttcatgtcttgacgtttcaaagagacccaagacctgagtgatcatatgagaaagatttttttcccaggctgacttcagaggaacatgtggtactcatttctacagtgctaaatgaccttcctcagagtctaaggtggaaagaagcaggggccacagtgatggctaaaatctcacaccccagctctcagtatggccagataccgccaagctacctccaccagggaacaaaagccaaactggtactttaaaaagatacttctacttaataaatggaggacttgcacttggaaagacggaacctatacagaaggtcctcttgtcttccagtctggtgtgtcaggtcaggttctctgactgaaatgggtagatgtaactatgaagacagggcaaacaaacaaacaaacaaaaagagcacaaaagccaaagcaaaaaaaaaaaacaaaaaaaaaacaaaaaaccaaacccaacaggcaaacaaaaacctcaaaagataacatcacctcttcttttgtgtagaatggaaagcgaacaatcggcagacgaggtcctggctgcagtgtcaacaagccttaagagctacccctttgacttccagggtgccaagatcatcactggacaagaggaaggtgcctatgggtggattactattaactatctgctgggcagattcactcaggtaaagacctcacacttcggaggtggttccaagagggtcactgccattattatcttgggcaatatttgggtctttagcaaagtgaatgatggatagataaatgaatggatggatgaagatacgtctacatttgtagccatcgctagaggaatatttaccttagtcttattactggagaatatcaaagccatgtcttcatctcagggagacaggggaaaagaaaatctactttaaagaatttattttaacaaattatgtgtatgtgtgtgcatctgtgtgagtgtgcctgtgtacaagagtgtctccagaggtcagaagaggccgtcagacctcctggaactggagttatatgcagctgtgagcctcccaatgttaggaatcaaattccagtcccctgcacgggcagtatatactcttaaccaccgagttctctccagctcccagatacatttcacttagtctcattttaatctgattaaaattaagactaactgggcagagacattagtgaggctgaggcaggagagttgcaagttggagtccagcctgaacaacatagtatgactaggtttaaagcaaagcaaaatgaaattgtatttgctaagtgaggagtgcttagcagtctccccgtggtgtgactctttcctcagaacagcctcgggtggcacattattgcccatgatgatgcttaaaaatagaatcttttctggcccaggtctcttagctggtggctgagtggggatttgttcttgtttgagaaccataatgttcttggcctctgctctgctattctcagagctgtgtcttcaaagccctcttgctggttgttgatactgatttgggaacccacagtagactttgagcaactctctgtccctggatctccatcttggcaagtaggatgtccagagacttctagcactgtcttttctttcaggaacagagttggctaagcctcatctcagacagtcagaaacaggaaacctttggcgctttggatctcggcggagcctccacacagatcaccttcgtgccccaaaacagcactatagagtccccagaaaactctctgcaattccgtctctatggcgaggactatactgtgtacacacacagcttcctgtgctatgggaaggatcaggctctctggcagaaactggccaaggacattcaggcaagtgcaactgaattcagttgtgctctcctcacatctggtcctcagcccccacatcctgttatttcccttgtaattcagtaactgctccaaagctggccattgcactccccaagccttctcaggcgggacaccaagctccatctggtgggccctgtgagccagtcggtccacccagacatccactcccatgtttgtttactgtactatctccaaggacaccactcagatcttttcttgggaattaatttctggacccagtggtgatgataatacaagttacatgctagattattgtttgcgggggggagggggggggaagccgtgaccatttatgtttgtctacaccatttttgtaatcagagaggaaaaaagaaccactgcggggaaaacacagaatttgtcaatcaataatactttattgcccccagatgctttctgcatcttgaatgcatgaatacatgcttgatgtaatgagattaccagacactccctggcaaatgaacacagagggaagctgtcacatccagctgtcccatctctggggaaagatagtcagttctcctctctcttccaggaactctcttgttcttaaaaccatcatcatcaagactgccatctagaagcaagtgtagctgagaggtgccctgggctccaaagtccacacgtctcttatctacagcagcttctcctttctttccttggggcttaagacctctctatttttttcattactggaataaaagacctaaggcgtcttcccacgcctggagctcccagtctggttgaggaggaagaaaggggacagcctgcagacacaagtacacctaggctgtagtcttacagaggttcttgcttgtaagacctactgtgtgcttagcactgtgagaccagagatattcccaactcatggcatttctgggttcaggatttaaaagcatatccccaaggacagtgaaggcaggacagggacatggtgacacctcactgagtatgaccaattagcattcaagtgcttcttccattcaggtttcaagtggtggcgtccttaaggacccatgctttaacccaggatacgagaaggttgtgaatgtaagtgagctctatggcactccctgcaccaaaagattcgaaaagaagctaccatttgatcagtttcgaatccagggcactggagactacgaacagtgccaccagagcatccttgagctcttcaacaacagccactgcccttactcccagtgtgccttcaatggcgtcttcctgccacctctccatgggagttttggggtaagtttgtgaaatggtgagatacattggttagagtgtttggtgttacaagttgcacaagacatgcatataaagtatttaaataatgtaagcctacatacagtagtgtctggatacaacgaggtgtttgttacttggccatcattagatgtcagtgtttaagattgccttctccgttatcttcttgacgtttgcatggtgcaaacagcgtggctgctgctccaagcattgtgtcatccccagccaaggcaaggtaggaaagagaatagtggtgagaggtgtctcttcatgcatctctctcatgcaccagagccagcaggtaccttttcagagtctgtcggccagaccacagtgaaatgcacaccccagagccgtctgataaaaggaattaataccatgtttgccttaggttcattatagtttggttcgtctacctggataagccgagggttccataaacaaggaagaagaaggctagccgcaggctatgcagccatcagagtctgctgagagcaataccctaaatatcagacatagcagcaggcatgggatgagtccaccgagggatgtcttctctaagaaacatctgggaagcagaaggttgggaaccactaagggagaacttaaataagcatccgtttcattgcagtttgtgggctgcatgatcactggatcctgactcctaattccttcttttcctaatctgtccagaataaagtaaggtattggtgcttaagaggaaagacaccccttgatctgttaattattcaaactgcctgtttgtttgctgagaccaaacactatcgtaatcacagttaagaagtgtgttgcaagagtttcctactatccgggcaagtgcagactacaaggccctggttacagacacattcattggatgtccacaatgctgatcaaagaatcggggcctgcgtctacctttctccctcttcaggaaaaagaacagatgaaaggagatttagttccaccccagaagcccagaatgagaggtgtttgtttgtttgtttgtttgtttgtttgcatggtctgtatgcccaacctaatgtcacataaaaagccccagggagagggagcattgggtgtgttgtaatccgacctgtgctgtgagctgtaggtgttctcagtactctctaagaacagtggggagagccatggacccaggtatgccttgtggcgagagatagctttccatccttctttggaggttcctgagaggactgtggcagcatcagtgacttcagggtagttggccagctgttggcatcaatccctagccagaacctggcttcaatgccgtgtgactgaactggttcctgctacggggctttcagggaccagggtccttccctgatttgagtgcaactttttgaagaggaaggaagtggggcacagagggaggcgtgtgaataaggctgctgcagacagctaagggctttttctctcgtgagccaggaaggataaacctaagcaaacctatcattcccagagccggctaacccggagctgtgaggcacagagcttgcgcagagggaagccttgctatgactgcagtcagccccgatgctctacagtcactttgtaaatgcagtagtaaaaatcagcccgtgtcctccagtctggctccgttgtggccttggcatctagattgaatccagtgtcaaagcaaactagaaacaccaacaggaaggagagaacatctgttgagaattatttatgaggtaatttagaaatcatttctgaagaacacattgtacaacttacataaacaagaaagagcagagatggagaagtataattaaagctcgtgctttacttaagtgtgtgccctgctggccaacaaaaaacatgattaaaaactcacatgcaactattttaaatttacttgaactttattaataggtgtttcttaatgttgaaccaggaatttgttaagttgtccaggctggccttgaacttgcagcctcctgcctccaaactcccacgtagttagttgggatgatagatgtccctttcttcctcctcctcttcctcttcatgttgtcttcttttttccttctcctttgaaagaaatcaggtttggaaatatttattacaaagtaaacatgaagttctcaaagaatctcaacatgaccgaacgtgaaacaacctaaaatctttaaaggcacagtgagaaaatctaggcttacaaaaccacatttgttattagcaaacagaagcatccttaggaaaagtgcccaaagccctgagctgcccagctagtgcctgtctcattattgatctccttttgcttttttttttcccctgctgaggctccatgctcaccttctgtggttggactactgactggtatagagtggctgacagtttctcggctgtcacccgtgcgcagctgcaggattctccgatgctcagctgttggagcagctcctcttgtctctttgtcaccatgtgggtctgagttttcagggcacctgtgttagtggttgaagtgaggtgacactaacctggacactaaccgggagggagcttgctggcttcaggactcatttggatttttcttctcatttttatggctgcccattctgcctgcttctggcaggaaggctcctgcagagtcctgatctgttaccacctaccgccatacaggatctgatgaactgggcgtctctgctgccctacatccagacagactgtcaacacgcacactcattctgcacaggagggttggactctttcggtaaagcagaaacgtgcatgtgtttctgcagggctagctgtcactgtggggcctgtcctccgggagcacttcctgttggatgtctcccttgctcgtttcttcagttctgggatcagtgtggaggagccctgttatgtggttgctaatggctgcatgttcactctgtgcagcagagcctgtcgcagctgctgcctgtgtgccctcttcttctctggaaacatagagctccactgtctgtctatctgtctgtctgtatgtctgtctgaacactgacaagttgctcagtgggattgttatctttggtggcatccagtgtacaaactcatcctccttggtgtcactcatctctgcttatgaagtcacatccatttcttacttggcaccattcactgtcaccaagtcttccataatgaccatttctgcccaccagctgccaccatctcagatgtgaagaaatgtggaccagaacaccctgcatgctggttcggagggcaaccaatggtgctgttgggtctttgcctcatagctaatggtggcaggaatgacagacagtcaggtgtctctaaagtctattctctgctcttgctactgcctagacttcgagtcccctcaaaatcttagctgctagtaatctattgctgttgactagaagccttgtcaatgacctcgacagttaaatagaacgtattttatatgtcgagcatattgcatgcagtggaagtatgcagaaaccgtacgggatagctttttttttttttttttttactgtagaacaaactgcactagagacacgaattcttcataggaagaacagaggtgtaaggtggcgtgtcagccagaggtttgccacacccaagcctcgccctaaagtgacacaaaggggtcatacaggtgttaccgttgtacagtgtggaccatggtgatccatttacccggccttgatactgcaccatttcagtttccctggactgttagtggtgcactattagcacatccatgttagttgcatggtggtaaacgtatcatggtgttaatcgtacacgatcagacagcagtgttggttatatggtgttaattgtgtgatagtgttaattatacactattacacatcagtgtgggtgtgcataaattttgatcttttctcttaggtttacatctgttcttgtgatagcaaatgatgaaatgtctccaaaatccaaaatgtcccacagtctaaaactctctgagatctgaggttcgatttcggagcactgtcatgttgaannnnnnnnnnnnnnnnnnnnnnnnnnnnnnnnnnnnnnnnnnnnnnnnnnnnnnnnnnnnnnnnnnnnnnnnnnnnnnnnnnnnnnnnnnnnnnnnnnnnnnnnnnnnnnnnnnnnnnnnnnnnnnnnnnnnnnnnnnnnnnnnnnnnnnnnnnnnnnnnnnnnnnnnnnnnnnnnnnnnnnnnnnnnnnnnnnnnnnnnnnnnnnnnnnnnnnnnnnnnnnnnnnnnnnnnnnnnnnnnnnnnnnnnnnnnnnnnnnnnnnnnnnnnnnnnnnnnnnnnnnnnnnnnnnnnnnnnnnnnnncatccccacccaggctatcacaggagccagcatcccagcagaatcaaatgctatttgtactttgtgattggcttctttcattaacatagcatcttcaacagtccagtcttgtttaacccctcaggagaccacaaaattctggagaatttgagaaaagctaaggatcttccaatcagaaaactggacatcaagaagtaaactgaaagatccccaaaataatttattcgacaatcccttctggtggatctgtgattgatcctgtttataaacatttttcccacagcaaaatgtacatggaaaatagagactaaaatccaaataggaggctgactaagcaggacagtgtgtaggagtgaacactcccacacgaaccaggggctgagtccacataaaagtttggaaggtctgacagtgcctgacaaatacagaagtggaggctcacagccatccattggactgagcacagggtccccaatggaggagctagagaaaggacccaaggagctgaaagggttcgcagccccataggaggaacaacaacatgaaccaaccagtactcccagagctcccaggaactaaaccaccaaccaaagagtacacagggagggacccatgactccagccacattgatggcctgtgggacatcaatgagaggagaggctcttggtcctgtgaaggctcaatgcccccagtgtaggggaaagccaggaccagaaagtgggagtggctgggttgatgagcatggagagtggggaggggataggggggttttgggagtggaaatgaggaaaggggataaaatttgaaatgtaaataaagaaaatatctaagaaaagggaaaaataaaaataaataaaaaaatgtaaaggtaaaagatattttttttttgtagtactgggaaacaaacctagtgattcatgcaaataagtacttactgactgcgggtcctcagctctaatattatcaaaatatttactctatgacttccagtacagaagtgccttgctcggtcacttaaatttcacagcaattctagggttaagatatatagagtatttactacagggccatcagatcaagagtgtctacactattgcctgtgagaatgtaagttctactttagtagaaattttgcaatattgaatattgttacctttattatacctaagatgtattccaaactgaaaacaaacaaacaaacataaaaacaaattacttacaatcatagtgaaacatgaaaagaaaaaggttggaaggtagattcagacacaaatgttgaggaaagtgacccaggtcctgacatcaccccatctctacaaagcttcttgccagggtagagtcagactaaacctagagcttggtaagcagacaagcaagttggaagagataaacaagacagaacaatacagaatcgagagaagggatcagtcaagtggccagtttgggggagaggttcctgatcccaaatgtggagcctgtttctgtttcaacaaatgtgcttaccagggcttcatttaaacaatgtcaaaaaatattaggttccacctttttatttgtttatagataaatttggtgctgagtttactttcttcgttgttttcttagaaagctgataaaaacagaatgtctgctatattaccagacaactagtttagactgggtgagctggaagattcgaaacaaaacaaaacaaaaagacccaaaacaaaacaaaacttgagtgtcatacaaatggactaatgcacacagttacttatttttgctaagttcgatatgagttctatataagaaaatttaaactgtgtatctttaaaggaacttcccccgggtttatttttagctgaaattggagcaaaccgattctttgcagcaagggattgcccgtagagccggagctgggctctgggaggctttgagtccgtgtccctgtgtgtgggacgcagcctgaaattctctgttctctgttccacaggcgttttctgctttctactttgtgatggatttttttaagaaggtagcgaaaaacagtgtcatctctcaggagaaaatgaccgagataacaaaaaatttttgctcaaaatcttgggaagaggtaagtgaccagaaaccatgactgtgaaattggttccatatcctcggtgtcatggaagatgtgaattggcacacaaccttatgctggtctgacaagggtccagccagtgtgttagaggaggccagagagcgggccattccttcacggtgtaatgatggcttaagcaacatcctacatttctcacttaacacagttttgccacaagcagttgctcacatggggttactctcttctttctaactcagctattgcttcttctgctctgttgtcatggatacagggtggctcccacggcctttacagttaaaagaaagaaagaagaagcaggcacatctatcctttatgcaggatttaaaaaaagatcatcccaaaagccccccatcaatcttcctttatttttaaacagtggtttttctcttgttttattttatttttgatggctatattttttatggtatggtatgttcaatgttatatttgcaccatgcacatttatcagagtaatggtcataatttttcactctaatcatgtatcatttatttgtggagcaagcattcaacaaccttcttaaatatgtattttgttattgctagttatagcaaacctgccttgcaagagaccatcagagcttacccctgcctggcaatgacctttcacctcctaaccgacctcctactgttcctcgtacagttgctttccccttctccaataccactgctccttgcctcaatgctatgaaatctttttgagtctctattaactatataatgatgagtttctttatgaatggctaaccttttagtattccatatgagaaagatcattcagtattcgccttcttgtttttggtttctttgacttaacaaaataatctccaggttcacctatattgtatgaaagggaagatgtcatttctttgtgtgtgtgtgtgtgtgtgtgtgtgtgtgtgtgtgtgtgtacccacacgtgtgcgtagggctaactcaaattttattttatatatggcctcattttctctgaacgtaggttaattccctatctgttttgttccggatgatgctgcaataagtgagagtacaggtctctctccgaaattaattttatttccttcggttatgcccatgctagtaaacttctgggtcatgcacagcgacttgatgcattctggggagcctttgtgctgttttctcatcatgagagcactgatttctgctccaccaacagcaatgccagggatctgtgacagcatgaagcatgctggtccatgtggtcggaggcttcctatccagtgtcttcttcagggtgaacatttttattgcagttttgctcagctttctgatcaggtttattcccaggctggttttttgtttgtttgaggccacggggagtggaaattgttttcttgatttcttttgtctgtaaggttatttttttttgaaagaattatttattttatgtatatgagcacactgtcgctgtcttcagacacaccagaaggaggcatcagatccaccacagggttactgggaattgaactcaggacctctggaagagcggtcagtgctcttaactgccgaggcatctctcaagcccctgtaagaccatttttagtgtacagcaaagctaccaacttttttgagtgtttgtttttgtattctactactttgactaaattgcaacctggaagtgttttctggtagtgttgctctagtgagtattagatcaaaagaataaggcacgatggacgtgtctgcgctaggaacagtttgatttcttcccctccatttctttctctggttgtcactttactcagaacctacgcactgtgctgatgaccagtggagagagaggacagaggaagtgctgtcaggtttccccgtgtagtaccatgttggctattgctttgtggtgggcagccttcatgtgttctttctagtccttcggggctctgatcagaagggaaggactgctggattttatcaaagagtttttatgtatctgttgagatgactatatggtgttttcttgtatttatatgctatgtcacgtttattgatttccatatggtgaaccattctcacatctttagcatgaaaccaaacgtgatcatggtacatggggtttttttttgtaatatattactgatttgattttcaaggaaagggttatgaatttctactaaactttaagggagaaccagcagcaggtgttccatacaacaagcaggaaatgatccctccaaacagatcctgcaggttaagcgttacactaataccaaaaccaggcagagaagacaggagggaaggaaagggaggtgccacctttcttgatgaacatcgatggtgtgtgtgtgggggggggggtggcagggggaagaaacagacacagacagaatcatcaagtgagaatgcagattctgggttggtaaccctggggagaagattggagccgtcccaagggatgctgatactgtcctccgcgctaaccttagtgacaagacttcgttggacatgatctccgtaagatgcctatagaaactctaacggctctgtgaatggcgcgtcagaggctgcttgagcagagcccctcggatgatgctctcgcagcttttaatccgctaacgtgattgttgagtaagggatgggctgaaatgctgaaggtgactgtttctgaaactcctagatcgaaggaacctcctttcccctagcacactcattgttctcacagagagcccctaggaagaaaagcttcctcgggaggggagacttgaacttaaaaccctgtggcctctgaaggagtgacgcaccatccccacagcctgtggtagagcctgagcctcagacctctgtgagctggggacttccttgtctcttcactgggtctagtagtgagaaggagccagagaaagtggctcgctgtagaggtctgatatttccttcatttttttttcttttagacaaagacatcttatccttcagtaaaggagaagtacctgagtgagtactgcttctcgggcgcctacatcctctctctcctgcaaggctataacttcacagacagctcctgggaacagattcattttatgggcaaggtaacttggggatctattgggggtgtgggagttggtaacaaagcagtcttgaacttagaagaggtgggtgtccacccaattagttttgatttggattggtgccagttccaccattccaccggctggcattcatgacaagcccttctgggagcagcaggcagcggtagactgtctttaatgattgggattcaccggttcaccgttctgcccacagaactgtaactggctctcaatgagtcagttcattcatttaatggtacttcattggcccctgtcctggctacagaatcccccccaaaggcctcttttgtgatccaggaaatgaagaacttggtctcctatcatccttgctgctggggctgttgcttggcaacctggcctagcgcgagacctaggaaataacctccctgctgtgctctgccacagtgccacctgcaggcatccaggagtaaagaagcaagcagccgtatgactccagcttgttgggaaacagcatggtgttctttgtgtcgctagcccggagcctgctactgcctaaaataggtttaccagcttttaacccacagagatctcagacaaaccaaagcaggacggtagcagcccagcgcgcacactcgcggcactactgacttccctgcagatcttgctcacttaaaggaaccttttccttattttaacatcctacacctcttcctctctgtcagtctattcttttgttagaaggatctgtttcagatttgactgagatgcagggtagtcttgatttacattcttgttggaataaatgctactgaagtggtctgatgtctctaagtcaaggtaatgactcccctatctcacactgaaaggaaaaaacagtcccttttcatattatcatcagtatgtgtcagagttcggaagaaaggagtattgtaagttggcgcaatatgtgctgaaggccgtaaagcacacacatcattttgacgcatcaccccgctccttagataccaagtatttggttaaaatggctaaaaggcagtcttcactggagtgtgttttaaaagatggtaaacatattttagtgatgatccagaaatatattaagggagtcatggtcaccaagtattcctaagtggattatccagatacgatgtaatacttaacttatttgttttgtaaaaagaacagcgacatgttcacagaggactggaaggacgtgtcacaaagaaaggacatcagaagtcctgagtggcaccatgtgcggagtttctttaggcttgtctgtgtatgctaacttctctatgtcatcccgaacagcttttgtaataaaatctttccaaaattgttatgcaaatatcatccctattcctgtaagttctaagtgactggacattatttttctaaaggtgagagggtcagaggctgctttataatttaataagaatcctttcttggagaagcacataaccttctaactttataaaggtgacttgctggaattatttccccacattttccctcatgaagccctggttccatgtggcttctctggcctgagatggatgtaaaagactagagccagccattattccttcatctttttacctacttcctgtcacctctcacttagcacctcaactcatgaaatagaaagaaacctgaccttctctggtctgtttgaattaagtgctcccagcgggtgaactggacagccagtcaccaaactctctgacactctagactctaatggtgaggctccaacctctcttttaatcatttgctttgttctcccctcccccatcacttccaattgtagcatataaaattaatctatagtttgaactatacaagatgttatcttcttatcggctactcagtgttatgtgggtggggatacatgaagactgcaaactatcattttggaccacgaacaacaagatttttcccttctgttaacagatcaaagacagcaacgcggggtggactttgggctacatgctgaacttgaccaacatgatcccagctgaacagccgttgtccccgcctctccctcactccacctacatcggcctcatggttctcttctccctgctcttggttgctgtggccatcacaggcctgttcatctatagcaagccttcatatttctggaaagaggcagtatagcaggagcggctgaaatgtgctggctggagagagaaaacaacctgcccaggaggcgggctccgccctgcaggaagggaggccggagtcaccctttcctgcttacccgggacagtctagaccagcacgaagcttctgaggctgcctggagcctttccttggggtcactcaacaccctcttcctcaaggacttcttggtgatactctcttgtcttttccagttaccctcttcctcctttgtcctctgtgcttgggctcacaactctcatggcctgtacttcataaaagaacaatgtcaactttgtcctgagtgccaccctgcccaagctgagctggctggaagaggaaacttggaaactatctcagccatggctttgggacgctccccccttccccatgtctcctaataaagccatgcagtgcctttggagagaagagacacaaacccagtccaagcctgccctttggataggagagttttctaaagtagataaatatgtgctaaagccaaagagtccttgccaaggagcttatgtgctcgtgcagctaatgtgactcagcatctgctgagaataagagtggagacaaacacattgtatgttcccgcgtgatgccaaaatgctaccaagtgcaacacaaaggccagagatttctgcagagtggatgcacatgtaggcattcagggcatagcatgtgacagta

SEQ ID NO: 52 - DNA, 2296 bp, Mus musculus
acaaaaaacacccaagacagacgagggaagaggaaggaaacaaaaagctgccccttatggaagatataaaggattctaaggtgaagagattttgctccaaaaatattctgatcatccttggtttcacctctatcttggctgtgatagctttgattgctgtgggactgacccagaacaaacctttgccagaaaatgttaaggcaatatgggattgtgttggatgcggggtcatctcacaccaacctgtacatctacaagtggccggccgagaaggagaatgacacaggggtggtgcagcagttagaggaatgccaagtgaaaggtcctggaatctcaaaatatgctcagaaaacagatgaaatcggtgcgtacctggccgaatgcatggaactgtccaccgaactgataccaacatccaagcatcaccagactcctgtctacctgggagccacagcaggcatgcgcttgcttagaatggaaagcgaacaatcggcagacgaggtcctggctgcagtgtcaacaagccttaagagctacccctttgacttccagggtgccaagatcatcactggacaagaggaaggtgcctatgggtggattactattaactatctgctgggcagattcactcaggaacagagttggctaagcctcatctcagacagtcagaaacaggaaacctttggcgctttggatctcggcggagcctccacacagatcaccttcgtgccccaaaacagcactatagagtccccagaaaactctctgcaattccgtctctatggcgaggactatactgtgtacacacacagcttcctgtgctatgggaaggatcaggctctctggcagaaactggccaaggacattcaggcaagtttcaagtggtggcgtccttaaggacccatgctttaacccaggatacgagaaggttgtgaatgtaagtgagctctatggcactccctgcaccaaaagattcgaaaagaagctaccatttgatcagtttcgaatccagggcactggagactacgaacagtgccaccagagcatccttgagctcttcaacaacagccactgcccttactcccagtgtgccttcaatggcgtcttcctgccacctctccatgggagttttggggcgttttctgctttctactttgtgatggatttttttaagaaggtagcgaaaaacagtgtcatctctcaggagaaaatgaccgagataacaaaaaatttttgctcaaaatcttgggaagagacaaagacatcttatccttcagtaaaggagaagtacctgagtgagtactgcttctcgggcgcctacatcctctctctcctgcaaggctataacttcacagacagctcctgggaacagattcattttatgggcaagatcaaagacagcaacgcggggtggactttgggctacatgctgaacttgaccaacatgatcccagctgaacagccgttgtccccgcctctccctcactccacctacatcggcctcatggttctcttctccctgctcttggttgctgtggccatcacaggcctgttcatctatagcaagccttcatatttctggaaagaggcagtatagcaggagcggctgaaatgtgctggctggagagagaaaacaacctgcccaggaggcgggctccgccctgcaggaagggaggccggagtcaccctttcctgcttacccgggacagtctagaccagcacgaagcttctgaggctgcctggagcctttccttggggtcactcaacaccctcttcctcaaggacttcttggtgatactctcttgtcttttccagttaccctcttcctcctttgtcctctgtgcttgggctcacaactctcatggcctgtacttcataaaagaacaatgtcaactttgtcctgagtgccaccctgcccaagctgagctggctggaagaggaaacttggaaactatctcagccatggctttgggacgctccccccttccccatgtctcctaataaagccatgcagtgcctttggagagaagagacacaaacccagtccaagcctgccctttggataggagagttttctaaagtagataaatatgtgctaaagccaaagagtccttgccaaggagcttatgtgctcgtgcagctaatgtgactcagcatctgctgagaataagagtggagacaaacacattgtatgttcccgcgtgatgccaaaatgctaccaagtgcaacacaaaggccagagatttctgcagagtggatgcacatgtaggcattcagggcatagcatgtgacagta

SEQ ID NO: 53 - protein, 269 aa, Mus musculus
MARTILCTHTASCAMGRIRLSGRNWPRTFRQVSSGGVLKDPCFNPGYEKVVNVSELYGTPCTKRFEKKLPFDQFRIQGTGDYEQCHQSILFNNSHCPYSQCAFNGVFLPPLHGSFGAFSAFYFVMDFFKKVAKNSVISQEKMTEITKNFCSKSWEETKTSYPSVKEKYLSEYCFSGAYILSLLQGYNFTDSSWEQIHFMGKIKDSNAGWTLGYMLNLTNMIPAEQPLSPPLPHSTYIGLMVLFSLLLVAVAITGLFIYSKPSYFWKEAV

SEQ ID NO: 54 - DNA, 173564 bp, Homo sapiens
ggcggtaggagttcggcggaccgagaggttccgcgcccacttcgcggcccagaggactgagcccggcctccggtgcaaggaaaccccagaggccggaactagaattgcaaattttttttcaccccggattccaacggtgagaaaccctttctatggaagaataatgttctcaggtgggggaaacacacctaaggtcacataccttaaaaaacagtctcctctaaatatggctttttttaaaaaaaaaaaacacattagaaataatgttcattcagctccttacattttaacattgagaaattttgaaaaccctaaagaaatgcatcaaatcattaaagatggactgcatgtttgttgttagaaaaagcagtgagagaaaaataagaaaaaagggcaggaaaaatgtgagaaaatagggagagaaagaataaaaaaaagaaacattgtctaggaggtgagaaaataagatggaggaatggaaatagaagatttttttccccgtgttaatggcaaattttttaagcctctctaggaggtttttgttcttcccgggaatggcgtgcctcttccgattccccacagcagcgcgggccatgggactttccttcggtattggaaatgtaccgtagctgcactgtccagcatggtagtcaccggccttatgtggcaattgtgcgcttgaaatgtggctagcgtgactgaggagctgattttttttttttttttttttttttgagacggtgtttcgctctgtcgctcaggctggagtgcagtggtgtgatctcagctcactgcaacctctgcctctaggattcaggtgattcttctgtttcagcctcctgagtagctgggatgacaggcacgcgccaccacgcccggctaattttatttttatttttagtagagatggggtttcaccatgttgtccaggctggtctcgaactcctgacctcaagtgaccctcccgccttggcctcctaaagtgctgggattacagctgtgagtcgctgtgcctggcctgaatttttaatttttaaattgtaattaattcaaagttaaccacagacgtgagtagctaccatattgtacagtgggactgtagatgatcaaaatcttgctcctcctagacccagtattttcctatgtccacggttctgacatctggattattttggatatttagttttagtatataaattaacatctgttaagagttatctaaaatctagtacacttacctaaaatctggtcaatacctccctttacaagtgaatcatttaactcaggtaagttttaggacatttgactttacttgaattctcttacaagatctttattttctaatgttttgaagtcagtagctaaaagtctctctgtgttataaatattttcaaatatgtttttatgttgttgtgtgatagacagctatgggagatatgtgtttggtcttaaaacatttatttaccttattagtaatttctataggaaaaggccaagttcatattattcagattatatgatcatatgtatatactagaatgtaaattccaaaaatagtgagttttgtctgttttgttcattgaaatatccccatgcctagaacagtgtctgggacatgttagatgtgcattaaatattttaaaaatatattaaaaattgttttgttgaactctttagaattaatccttaggaatatttttagtttattttatttcaggattgtatttctttctataaaatttcttctttttgcaaccaatttaccatgtaatgatctttctataaaatttccattgtacatctgatcagagactattttagatttcaaagtttggaatttaaatggcaactctcaaatagtgttaaattatttctgaatttattagcgttggcaaaagactgttggttgaagtaattttagagatgagtgataaggaagtaatgtttccggatctttttgagttgctttttcttatttttgaattttaacacaacttttttttagaaaagttatttttttctcttttgttatagttaagcaaaaagattatttgtattgctgttttttaaacttgttttatttattgatttaattaattaattaattaacttatttgagagagtcttgccctgtcacccaggctggagtgcagtggcgccatcttggctcactgcaacctccacctcccaggttcaagcaactttcctgcctcagcctccctagtagctgggactacaggtgtacccaccacacccagctaatttttgcatttgtagtagagacggagtttcaccatgttggctaagctggtctcaaactcctgacctcaagtgatctgcctgcctcagcctcccgaagtgttgggattacaggcatgagccaccgtgcctggcatgtattgctgttttgtatttgtaagaatctctgtaatatagaactctcaatacttttgagatccagtattaaaatctgaaagataattttgtggatgaagaatgaaatttattcacatgtgtcatgcagatgtcaggtttagtatggggaccaagtcttaaattgagatcatataatatcatctcagaagcagagatttccaaattagatcatatgatactagcagttgtctgtgtttgggattaaaagagtttaatatgtaattggaaatttagcaaggagattgtactgagatggcagacaacaagttctgtccttttcccacttctccccccttttccaaaaatctctgaaaattacagaaaacttagatacacacacacttgtgcatacatgaacatgcccagaattgaaatacatgaaggtgtgctctcatgggccagacattataagaatacttgaaaaatagaaggcacatgggatggaattgaaggtggacaaacaacagttgcataataaaggccttatacagaaatggaagtgactcttggagtgctctaagcacacagaaagaaggtatttgttatcaatagtggcccttagacaattctatgagttattgattgaagtaccactgtaggaagagccaggtcagcctctcaagcttatccctacttgtgcttgcggtggatagcagaagaattttcccctaaaggtggtggtgggggtggcgggaggcagtccatgtatacttttactgaaaaggcaggacagtgccctggatggcttctgacatttaggaggaagagagaggccccacacgttgagactggtcctagcccactactaggtttgcgtgtctcctccaaaattcatttcaaaacttaatccccaatgtgcagtattgagaggtgggacctttaagaggtgatttgatcatgaggtctctgccttcatgaatggactaatccattcacgggttaatggattaatgtgttgtcatgagagaggaactggtggctttacaagaagaggaacagagacctgagttagcaagttaacacgctcagcttcctcaccatgtgatgccctgtgctgccttgggatgctgcagagagttgccagcagcaagaaggttcttaagagatgcccccttgaccttgggcttcccagcctccacaactgtaagaaatgaattccttttctttataacttatcctgtttcaggcattctgttataagcaacagagaatgaacgaagacagaaaattggaaccaagaagtgggattttgctgatgacaaatacctgaaaatggggaagcagctttggaactaggtaatgagcaggggctggaagagtttgaaggagcaggctataaagtgactgtatttcagtgaatggagtattaagggtgattctggcgagactcagaaaacaaaaagacaagggaacatttggaacttcttagagatttgttaaatgattgtaaccagaatacggatagaaatatggacagtaaaggccattctgctgagatttgagatggaactgaggaaggtggtattggaaaatggagtaaaggccatccttgttataaattggcaaagaacttggctgaactgtgtccatgcctgagggaattgtggagggccaaacttgagattaatgaactagggtatctagcaaaagaaattcctaagccaaatatagaaggagctacatgattacatttgacaacttatgctgatattcaggagcaaaggaataatttaaaggtagaatttatcatgaaaagggaagcagagtggaaggatttggataactctcagcctgaccacatgaagagtaaaaaagcatgttcagcagaggaaaccaagggtgcagcccagtgactgtttgctaaagagattagtttggataaaagggagacagataccattcctttagacaagggaagaaagatcccaaaggcatttcaaagatcttagagggtgcccctcccatcacaggcccagaggcataggaggacagaatagtttcagaggacaggtcagggtactctccacaggctcactgcccagggccacctcaagggagtcccaccggcaagatggctctcaccaggtatgcctctttgactttggacttcccaggcttcataactgtaagaaatcaatttttttctttataaattacccatttttaggtattctgttataagcaacagaaaatggactaagatacacaccttgtcaaactccacatctaccattttcttcttcaaaaaccctgcaggtggaatgcaataagcagatcccgcctgtgcataggctaacagggaatctcagttaccaaggtggacacacactcaaaagatctacatttgaaaaagaaaaaacccagcaaacaaaaaaagggtataatattcaagaaacatcaaaacccaaggccgagtacagtggctcacacctgttatcctagcatttgggaagcagaagcaggaggatcgcttgagccagggaggttgaggctgcagtgagccatgatcacaccagtgcactctgccctgggtgacaaagtctcttaagtaaaggaaaaaggaaaaaaaaatttaaaaaggacaagttagaaaaatagtttagaacaaatataattaacatttatagagagacatgagaattttgcatctattagagaggaatcaactaggaattgtgattaaagatggaagaaaaatgcacatttgggccaagtgtggtggctcatgcctataatcccagcaatttgggaggctgaggcagggtgattgcctaagttcaggagttaaagaccagcttgggcaacatggtgaaaccctgtctctacaaaaaataaaaattagccaggtgtggtagtgcacacctgtagttccagctacccaggaggctgaggtgggaggatcacttgagcccaagaggttgaggctgcagtgagccttgattgtgccactgcactccagcctgggtgacagagcaaaatcctgtccaaaaaaaaagaaagagagagattgagagagagaaagagagaagaaaagaaaggaggtaagaaggaaagaaagatgcacatttgacccctcttttgaaattttattaaaatacctgttaaaagacttaaaagggtatatatttataaaaacaaaaagtaggaggtgtggttgaccatcagcatggtcagtatggaagatttttcatacatttttgaagaaattggaaggatattgactgaagaagcagcagcctagaatatccatggaaagggactgcagccaaaggagacagctgccttccagcagaataccacagagtagccagaactagcgatagcaagtaagagagaagataaaaggtaaagttgatggaaatcaagaaaatacatcgaaggtctatatggtatatggaatagtttgcctttgtactcaaaaggacctataactagatattttctttgaggaaaaaatagagaattctttctagaaattgatacactagttaatataagagagatttgagaagtaatcaataaaacattcatgagagcagaatatttggcaaaggagcaatcagaataagagaaagctcttggaaattaaaactattaacttttttgtttaaaattttggaagataaatataaggacatctaatctattgaacaaaaagataaataaatagaaaatatgagacactgaggattaaatctacaagtccaatgtttgattaatatgagttccaggaaaaaaaaagaaaatggaagaattaaattggttaaggaaatattaggaactcacacctgtagtctcagcactttgagaggctgaggcaggaggatcgcttgaggctggaggatcacttgaggccaggagtttgagaccaacctgggcaacatagtgagactccgttcctacaagaaatgaaaaaaaatacctgggcatggtggcacgtgcctatagtcctagctgcacaagaggctgagttgggaagatcgcttgcacccaggaaattgaggttatagtgacctgtgatcacagcactgcactccagcctggacaatagagcaaatctctgtctctattaaaaagaaaagaaaatggaaaaacaataaaacaaataagtccaaatatataaataattacaataaatatgaataagtttaattcatctattaagaagtatattcttttttttttttttgagaccaagtttcgctcttgttgcccaggctggagtgcagtggcatgatctcggctcactgcagcctccacctccctggctcaagcaattctcctgcctcagcttcccaagtagctgggattacaggtgcccaccaccacgcctggctaatgttttgtatttttagtagagatgaggttttgccatgttggccaggctggtctcgaactcctggcctcaggtgatctgcccgcctcagcctcccaaagtgctgggattacaggcctgagccaccgtgcccagccagaaataaaatcttaataggcaaatgctaataaggaggaaacagatgtggtaatagtaatgacagtcaaaatagaattccagcctagtgcagtggcttgtgcctataatttcagctactcaggaagggaagttgaagcagaaggactgcttgagaccaggagttcaagaccagccgggcaacatagtgagaccttatctctaaaaatataaagataaaaataaaattctaagtgaattatatttgagggcaatatatatttcatctttataaaagttacagactacctagaagatgttaaattaatgaatccttgtggatctaaagacattgttttaaaatataaaagcaaataactagtggaaagagtagactaggtaaatccaccatcagagtaaaagatttttatcatacctcttccataaatagatagattaaataataaaaatagagaaaaagatttaaataagtgattttaaaattctcaatttatctatagatggtgtagaacttgaacctaataagcaaatagtactaattattttcaatcatacttggagcattgacaaaaattgaccatgtattatgccacaaagggaatctcaatgaagagaaaaaaggcaaagattttatagtacattctgcttgccacaatgcattaaaattagaaattaacataaaaggacagcaaaatatcctcttggaaattaagggaaaaaatcacatttttgaataaatcttgagttaaaagaaaataaacacaaaaattacaaactaattaaaaatgaaagttaaacaactagaatacatagaacaaagccaatagaacttagagaacttttatattttcaagtacttttattttttaaaaagaaatatttaaaataatcctaaacttaatcttacaatttagtaagcaaacaaattacaaattaaaagataaagaagagaattcataaagataatagaggaaattaaaaattaaaaacaaataaaaaatcagtagagtaattgataaaaccaatagctggttatgtgaaaagataaacagacaaatgtttagaagatcaaattaaaaaacacaaattaataatattaggtcccaataagaggtcataacaattggtatagacttaaaatatatatatgattaatatatattcagtaaaatagctgacaagatggagaatttcaccagagactgaaacctatgaaaatgcatcaaatgtaaatcctagaactgaaaagtacaataatggaaattgagaactcttagattggtttaacagtggattaaacacagcagagggcaggattagtgaactgaaaaactagattatttgttaagatctagtataaaacatgggaaaatgtgttgaaaattcagaaaagaatgtaagagacaatgtggggagagtggtagaaatactgatatgtaattgggccccagaaggaaaggagagagataatggggtagacacagcaatatattaggatattttggctgaatattttcccaaataaatgaatgttatcaatctgtagattccagctctacaaaacccaaacaagataaatttaaaagaaaataatacatggggatatcttactcaaatcccaaacattgacaaagagaaaatctttaaaatgtatagcttaaaaagacatattaccttcaaaacagcaacaataacacctgacttttcttgaaacagagtctcactctgtcgcccatgctggagtgcaatggtgcgatctcggttcactgcaaactccgcctctgggttcacacaattctctgcctcagcctccagagtagctgggaatgacaggcacctgccaccacgccaggctaaatttttttttttatttttagtagagatggggtttcaccatcttggccaggctggttttgaattcctcacctcgtgatccacccgcctcgggctcccaaagtgctgggattacaggtgtgagccaccgcgcccggcctacacctgacttttcaacaaaaataatggaagttataaaaagtcgaatatctttaaggaagctaacctaaaattgtatacccagcaaaagattcctcaaaaatgaagataagataaaaatgtatttataaaccaaaaactgagggaaaaattaccactaacagacccacacaaagaattgctaaagggaattcttcatgctaaagagaaaatgatctcagacggatgcatggaaatgcagaaataaatgaagagcaatggaaagaataaatataatgtcaatatagaaaattcaattgtattcctatattatagccataataaagtaaaacttttagatgataaaatgtacaattacctgaagaaacactaaatacacaggaataaatctgaaatagtataagatctttacatatcactgggcgcggtggctcacgcctgtaatccaagcactttgggaggccaaggcaggtggatcacttgaggttaggagtttgaggccagcctggctaacatggtgaaacgctgtctctactgaaaatacaaaaattagccaggcgtggtggcaggcgcctgtaatcccagccactcgggaggctgaggcaggagaatcacttgaacccaggaggcagagattgcagtgagctgagatcgtgccactgcactccagcctaggcgacagagcgagactctgtctcaaaaaaaaaaaaaaaaaaaaagatctgactgggcgcagtggctcacacctgtaatcccagcactttgcgaggctgaggtgggtggatcccctgaggtcaggagttcatgaccagcctggacaacatggtgaaaccccatctctactaaaatacaaaaaattagccaggcatggtggttcatgcctgtagtctcagctactcaggaggctgaggcaggggaattgcttgaacccgggaggcagagattgcagtgagctgagatcacgccactgcactccagcctggcaacagagcaagactctgtcaaaaaaacaaaacaaaacaaaactacatatcaaaatatataatatttctgagaggaataatagaaaacctaaatgagagctgcaccaaattcatggctagaaagacttattaatgaaaacatgtgaagtcttcccaaattcatgtatagattcatacagtccagtaaaaatttcagcatttttgggtaaaaattgacatgctgatttcaaatttatgtgtaatttcaaaaggtcaaaaatgccaagagaatcttaaagaagaacaaggctagaaggcctctacctactagatatcacatcttattattaagataaaataattgttagaataaaatggtatcgctttggctccaagatcaacaaatagatcaatggaaaagaatagtgtccagaaaaagacccacacatatgtagtcacttgatttgtgacaaaggtaatattacagtacagtgaggaaagggtgattttgtcaataaactgtgctgtaccaattggatatttatagggatgacagtgtatctgtactcctaccttacctatacccaaacatcaattttacatagattttatacttagggaaaaaataaagcttctagaacgtgatgtaagataatacgatcctgaggtaggcaaagggtttttaagctggacaaaaatcactggtaataaagaaaaagattgtttaattgtgtcttgttaacattgagaatttctcttaataaaaagacagtattaagagagtaaaaaggcaagctactcaatggtaaaatattatatatatatgtatatatatgtaaatatacacatacacacatataaaaagaaggatgtgtacccagaatacgtaaagaatccatgtacaatcccccaaaaaattgaccaaaattttgaccagacttttcataaaggaggatatataaatgagtaataaacataaaagagaaactcaacatcattatcaaagaagtgcaaatgaagacaataataagatagaattccatatcttttaaagtggttaaactttttaaaggtggaggatatggagttactggatatttcatttgctactgataggggtataaattggggctaccatttactgttgggcttcatataataaagctaaacatatacataccctatgacccagcaaaatatacacttttaggtgtatacccagtagaaaatgtgtgtgtgtgtgtgtgtgtatggtaaatacatatatttaacaaaagacttgtatgacaacatttatagcagcatgatttaaaatagcaccaaactacaatcaaccttattatccatcaaaagcaaaatgtatataaattgtagtatactcatacaatggaataataatattgcaatgaaaatgaacaaagtactgccacacaacaattttttttgttgttgttgttttttgagacagagtgtaagtctgtcacccaggctggagtgcaatggcgtgaactcggctcactgcaacctccacctcccgggttcaagcgattctcctgcctcagcctcctgagtacctgggattacaggcgcctgccaccacacctggctaatttttgtatttttagtagagatggggtttcgccattttggccaggctggtcttgaatttctgacctcaggtgatctgcccaccttggcctcccaaagtgctgggattacaggcataagccactgcgccaggccaacttagacaatctaaatgataatcgtgttgatttggccaggcatggtggctcatggcactttgggagtccaaggtggttgaatttgctttagctcaggagtttgagaccagcctgggcgatgtagtgagacctcgtctctatgaaaaatttaaaaatttagttgggtgtgatggcatgcacctataggtccagccacttgggaaactgaggtgggaagttcacttgagcctgggaggtcaaggctgcagtgagcagtgatcatgccactgcattcctgcctgggtgagtgagtgagaccttgtctcaaaacaaaaacaaaaacaaatataatgttgatctaaagcaagatacacaaaagaacatattatattaattcatttatataaaattcaaaaaataggcaaaactgccttatattattagaatgttggacagtggttatgttatgggatctttgggttgtcaattttcttcctagaaacctctgtggccagtagcgcctttgttcaagttcttgtcctgcgtccaggaagaatgaggtacacagacaagtgaaggatgaacaaggcaaagataaactttattaagtgttagaacagctcagaggagaccctcagtgggtggctcctctctgcagatcctccagtcaagtgttcagctctcagcatagaggaggccctggggagggtagctcctctctgcccgctggtcgtcccatcatctgctgctctcagcagagaggaggccctggagagggtggctcttctctgcagacaggttgtttggaggtctctgcaggcctctcaaactgtcagcagatggtagctcttctttgcagctggttgtcccctcatctctgtcctctgcatcctctgtcctgctctggccatcctctctagtcctgtggctcatagggtagtaagtacatgcagattggtccatgggtggtcataggcagcagggagtccccactctggtgtgtgggactggtggcctggccctcagctttcaggccctccatggcctgaaggtggtgccttactggggaccccacccccttctgcccagcaacctgtctgccttccgctgccattcatggcccgggtgttcagcccaaccccacttggagagatccgagcaggcactgggagagaagagaggtcaggcagtgggagcagacgctcctaagcctgcagggactgaggggggtgccttcctgggcacccgagggtgcaggctgcagagatggccgggtcctgtgcctgggagggtggccacagctatacctgggagctcccgccctgccaactcagggatcccgcttgttcccaactcctgcctgctccatgcagcggggacctggtctgcagctgttggtcgtgggggctgcagctgcacccgggagggcagatcctgcctgctcctggcctcctccaagagcacagggaggctcagatgcacagccatggtttgggcagctgcagccctgcccaggagggtggagcttctacctgctccatagagcatgaggcctgggtctgcagccacagtttgggggggctgcagtggtacctgggtagctcccaccccaattcagaaagggcaggcctcccactggctccatggagtgcccaggcccagcggggcctccctgctgcagctagtgtgatggtagcatccgctgccatcagttatgtttgagaggagtagtgactgggtaggaatacaatggagatttctgagctggtggtaatcatgtcttcaaatgggctagggttacatgggcaggctcactttttttgttgtttgtttgttttgttttgttttttgagacagagtcttgctctgtgtctcaggctggagtgcagtggtgcaatcttggctcactgcaacctccacttcctgccttcaagcgattctcgtgcttcagcctcctgagtagctgggattataggcatgtgccactatgcccagctaattattgtatttttaatagaaatggagtttcaccatgctagccaggctagtcttgaactcctgacctcaagtgatctgcccaccttggcatcccaaagtgctgggattacaggtgtgagccacctctcctagccatcactttgtaaaaattagtggagctatatatacatttgatttatgcgttgttctgtattcatgtttatacttcaacaaaaaagtttacttaaaaaaagatactagatttttccaaattagattgtcaacaatgaaaaagtttgatgacatcaaatgatgatataaaaaaatgggtacactgcattaggaatgtaaactgttatagccttttttggagggccataggtcagtatctattaagtttttatatgcatatgcccctttattcagggatttaacttcttttttttaatttttatttatttttattttattttattttttttgagacagagtctcactctgtccctaggctggagtgcagtgccgtgacctcggctcactacaacctccgactccctggttcaagtgattcttctgcctcagcctcccgagtagctgggattacaggcatgtgccatcacgcccagctaatttttgtatttttagtagagacagggtttcactatgttggcctggatggtctcaatctcctgaccttgtgatccgcctgcctcagcctcccaaagtgctgggattacaggcatgagctgctgcgcctggcccagagatttaacttcttgatagctattccggagaaatccacacaagtgtagaagaggcaaatagaagcatatatattggaaacaatgtaaatgtctatcagtagcagagtggataaataaactatgatgcattcattatggaatactctgcaatagcaagaatgaggtagttctttatttagtgaaatggaaatatctccaagacaaatacatgaaaaaaccaagttacagaacagtacacagagcatactatcatttacactaaaaaaggcacatttaaactcttaacccagtgtctaataaaaagttaaacaatgtttttgtggtagtatgtatgttgtgtggtacttagattttgaaaaacagttaataataatttcgtgaaaaaaattctgctctggtagcaaaagaacagcggtgagagctctctcaatacaataattacaaattgagcatttcttcatttttaaaaacttaactgagtacctgtagaatcattttcatcagctgagactttttaaaattaaattttctatttcatgatagatgaagttgtaggttatgcaacctacaaccttcaggtagatgcatgaagttataggaaattgagagtactcagagcaatcctgtgtaccctcaaaggtaacacttcaaaaactatcatacaatatcacaagtggaataatggcattgatacaacccaccaatcttcaagatttccccagttttatttgtgtgtgtgtatatttagttcatgaaattttaatgcatgtgtagtttcatgtttccaccaccacagtaaagatacagagcagttctgtctccctgaaaatctctcctcttttccttattttttttttctgtttgtttgttttttctttgtttttttgagacgaagtttcgcttttgttgcccagtctagagtgcaatggcctggtctcggctcactgcaacctccacctcccgggttcaagcgattcttctgcctcagcctcccgagtacctgggattacaggtgcctgccaccacgcccggctaatttttgtatttttagtagagacgaagtttcaccatgttggtcaggctggtctcaaactcatgacctcaggcaatccgccggccttggcctcccaagtgctgggattacaggcctgagccaccgggcctgggcctcttgtcttttcataaccaaacccacctttcttttcccactcctgctccccaagatgcagtgttttttgttgttgtttgtttgtttgtttgtttgtttttgagacggagtctccctctgtcgtccaggctgaagtgcagtggtgccatctcagatcactgcaaccaccacctcctgggttcaagcaattctcctgccttagccccggccccccccaccagtagctgggattacaggcatgtgccaccacgcccagctagtttttgtatttttagtagagagggtttcaccatgttgaccaggctggtctcgaactcctgaccttaggtgatccacccccctcggcctcccaaagtgctgggattacaagcgtaagccactgtgcacagcccccaagacgtaattttaaaccatcattaatttttataataaccatgataggccaggcacggtggctcatgcctgtaatcccagcactttgggagacggaggcggacagatcacttgaggtcaggagttccagactagcttggccaatatggtgaaaccctgtctctactaaaaatacaaaaattagccaggtgtggtggtgctggcctgtaatcccagctactcaggaggctgatgcaggagaatcacttgaacagaggaggtggaggttgcagtgagcagagattacaccactgcattccagcttgggcaacagagccagactgttttaaaaaaatttttttttaatgatactcatgattaaaataactatgtaatttatctaaattattgtttacaagcatttatctaagtaagttgaataaacggtgtctacatgtttagtagaaaacaaatgtttagtagctctggcagaattcatctccttgctttttaagagattaataaacaatgaatacattgtagaggaaagaagtatgttttcactttgaaacctttttaaaaatttttctttagccatttagtattaataacaagggaagtagtattaataacaagggaagaggggtttctactccttttctttttttctttgctcttcttcctcatttcatcccttggagactgtctatagtcccacattttgtccagttttgaatctgtgtaattttgactctatggcagaaactgtttattgctgactatatatttgttctctcttctctcaaataaacagagccccaactttttactgagcacaatatagccaaaagatgacattgcccagcctctttcgcagatagctgtggctattccaggatcccagaaaatggtagccacaaatgaaggcctctgaagcagaactgccctggatctttactgtgctggtgccctctcggactttctcttgcccttctgtctctggcctctcattctcccccgagaaatggaaactagaattcctcttcccccaggtgggtcatagaagccagcaacaaaacctaaaaatatcactttaactttctctttctcccagcctttctgtataaaaactggccataaagaaatgatctgacctgcctcgtttgactgttccagattgttgaaacccattctggagaggcttctaccccacatttagactgttgaatcccattgcagagcgggtcctgtcccacatccagaaggaaggaaggcacagaggtcaagaagaatctagatagacagcattgctgagtttctcccactcagtctatagcattagatcacactctttttttatcctgttatatttctacatggctgttcatacttggttgaacctaagcataaaagtggacaattcccctatatcttttatttattttatttattttcactttttttagggacagggtctcacactgtcactcgagctggagctcggtggcacaatcacagctcatgcagcctcaaactcctgggcccagcatacctggctaattttaaaattttttgtacagatggaatcttgctttgttcctaaggctgaccttaaactcttggccccaaggcatactccctcctcagcctcccaaagtgctgaggtcacaggcatgtgacactgtgcccagcctccccttcaggtcttcattctgcagtctcctgtgtacgtgtaaaattatgatcaaataaatttgtatgccttttctcctattaacctgccttttttgtcagcgattgtcagtgaaacttcagagggcaaaggggaagttttccttggcccctccagttttggtgctgtgaacaggataccaaagctgctctgttcttctggaagctgcaatgaagggaaccaaggacctgacaagccagcagaagggtaagaaattcttaccagtcaggctcccggcctctctccctctgtggaatctggtagagccgatggtaaaaatcactgtttgtctcattttcatctccaaaaccttgattaatgagaaaaaaggatttgtgtgactagttttgggtgtagcgactctggtgtccttttttggtatgaatattcacattgttcggtccctttccttccagaaatagtctttgtctttccgtgttgttgtgtcataaagaaggatgccatagggtaggacatgggcctaaacccccataaactctctatttgagctggcactgcagactgatcagttttgcggttctgactagacctgtgtctataaactttgctgtagtccccaaaataaaaaccagatgaagttctcctattgtcttatttcatgtccgtataagaccttgacttttgagagcattttctcttggtccttgcgattttagggagcatgattttcaggtcacattaggtgaccagtctaaaaatggctggtcacataagattttaagcggtatactttttgttccaactatgtcaagctctcaggggagtttgtcttaagttccatctgtaaggggctcctgttgcctggttaggctgggaaaattctaatcccaggagggcctacctggtgccagtggattaacgggtctgtgactggtggtccctggcaaatttgttggttactagtggcaccatatgcacaaacaccagccttaatagtctgtggtgggctgggcactgtggctcccgcctgtaatcccagcactttgggaggccaaggtgggcagaacacgaggtcaggagatcgagaccatcctggctaacacgatgaaaccccatctctactaaaaatacaaaaaattagccgggtgtggtggcggacgcctgtagtcccaactactcgggaggctgaggcaggagaatggcgtgaacccgggaggcggagcttgcagcgagcagagattgcgccgctgcactccagcctgggcgacagagcgagattctgtctttaaaaaaaaaaaaaaaaaaaataggctgtggcggcaagagtctttgttatcttaagtctacttctcagtgaattttcggggatcatggagactgtctcctccatatgctctcaaggaacacctcttgtttatatagtaaaaacttattctaaacctggaaaattatctcctggacttttcatgaagaggcttattgttgagtcactactggaatttgtaaaccattggaaattctaatcatcagtggccaaaagatggatcctttaaattagaaagaactttaatttttttttcttaaaaagaagattttggagatctctcattctaaacaattgtcttacttgtatttatgggacaatcaaattaaagaaagacacaatagtgtcttggcttagaaattctcttgacaaaattaaaatgcaaaagtctaacccaaaacaaaattaaaatcctttgtacactcaaactgcctgctttgaattccctgtgggatttacaaataaggcattccaccttgtggtgcagtggctaagattctgtgctttcacacctgtggcctgggtttgattccttgtcagagaatcagtccctgtagtacttgtaagctctttaactcaacagcacaaacatttataaaacttggtttaatatttgtgtgactcttgacttttggggtacccatttgttattgatggacaaatgtccacaaaaaaggtagacaggatatccactgcagctggagtgagagacaaggggtgggttagctctaccatgaagcagcagcagaaaggaaaaaaaatctatcaactatttttatatccatccatatagccatccatccattcatcaatttaaatagttacagctattttggcataagtccaaatttttgtacagctcaaagtgtagtaagtctctattttatttatttagtctagaataatgtcaccattatcacagaaatgacatctacatttttcttaagttaaagtttgaggcctgggcatgatggctcactcctgtaatcccagcactttgggaggcagaggtgggcagattgcttgagctcaggagttcaagaccagcctgggcaacatagtgaaaccccatctctacaaaaaatacaaaaattagctggatgtggtgccatgggcctgtggtcctggctacttgggaggctgaggtgggagaatcccttgagcctgggaggacgaggctgcagtgaactatatgattgcaccactactactgcagcttgggcaatagaatgagaccctgtctcgaaaaaggaataaaaataaaatttacataaataaataaataaataaacgttaaagtttgaaaacttaatttaccagttatttttcttatttaattagtaatacattacttcttttcaggtctcagttttggattgtaactaaccactgttctcttttggaggcatagtgccttaataaatgtattattttgtctaccaaaccatgtgtttgttgccaacttgcagtctagcagtaaagaagctaattttttcctgagtttaagattatgttgaaaaatagaatagcttataacactttataatattatgtattataccaaacagagatgaaactaaataagtttacaacctcttaatctttgcacaaatgctatcatttatttattcatttgtgcattactttacttcatggaaggaatatatttatcatttatttgtttttcaaacagaatttcaaaaattttttttttttagaatatgcagtgtttgtaaaactacaacagcagcagcaacaacagtttaagaataagattagcccacatattatcaaaatagtattttcaggtctgctttcttacatcttgtgagaatgtacattctggatactatcttactgtttcagtaagccttggaattgttttgcaaaaggacaacgggaatgaaaagaatcgttaagttttcactggagagagttattcccctcggttatccctggaatctggaaacattatagtttataaacttgtttaaataaaaggtttttgcaatgattcttgttatgcctttttgatttctcctggaacttcatgataacaatatttattttttgtgaactttacttaatcaggagtcatttcagataactgagtcataccctcttgtctctttctcctttcaattctgtcagtatttgcttcatgtattttggggctctgtggttaggtgttatatgtgtataattgttatattttcagatgtattaacctttttattatgattagatgtccttccttgtcttaatgtgccttgtcataaagtctatttcatcttatattcatatagccattccagctctttcatagcagctatttgtgcatgctattcaacctactgtatattttaaactaaactgtgtttcttttaggcaacatgtagttagatcttgtttttttttttaatacatcctgacaatttttgtcttttgattaaactgtttagttcattcacatccagtgtagttattggtatgtttggatttgtctattttgctatttcctttctatatgtcttatttcttctttttcctctgttccccttttactgccttcttttgttttaaatcaatattttaattcatttagtgagatataattcacatacctttaaatttacccctttaaagtgtacaattcagtggtttttagtatatttatagagtcattatctaatttcagaacattttaattactcccaaaagaaatcctgtatctataagcagccactcccatttccctctccctcatcccctgacaactacttatttatatttgtatttttgtttgcttgtttgtgacagggtttcattctgtcactcaggctgaagtgcagtggtgtgatcatggatcactgcagccttgacctcccaggctcaagcaatccttccacctcagcctcctgagtagccgggactacagatgtgtgacaccacatccagctaatttaaaaaaaatttgtgcagtcaggggtcccactatgtggcccatgctggtcttaaagtcttggtctctagcaatcctcctgccttggcctcccaaagtgttggtattgcaggtatgaaccgctgtgcccagctcatttttaagtatatttttaaagttcatttttcagtggttactctagggatttttatttttcttgaacttcataactttaacttaaaatccacttcaggttaatggtggtttacctgtgataagatatggcaactttgctccactatagctcagttctctccttttgattttggttgcgaacggcagtcctttggttcctatttgttcctgcattgctgtggtttgagtatggtttgtcgccaccaaaactcatgttgaggcttggtccccagtgtaacgggttgagaggtggtaagactttaaaaggcatttgagtcatgaaagatctgctcttatgaaaggattaatgccatattgtgggagtgagtgagttctgtctcttgcagtactggattaattactgagagagcaggtggttataaagtgaagtttcctctcatgttttgtctcttttccacatgcttgcttgccactgtcatgtgtgctcctgccatgtgatgccatctgctatgttatgatgcaacgtgaggcccttgtcggatgtggcttcccagtcttaaacttcccagtctccagaaccatgagctaaataaacttctttttaaaatcaattacccagtctcaggtattccattatagcaatgtaaaatgaactaaaacatgcatatccttgctgagcgtgacagatggcaagctttatttgtcttctgacactgagccatttctgtagctagtcatatagtcaactagctggtcaaggtgaccatagagtggtactgtgtccctgctcactacctaaggagaggcagggaaactggatttgctgcttgctcaaaaagtgttgggccctttgcctgggttgcaacccactgtgtgggtaggcatgggccgtgtgggatttaggcataaggaacttaggcaaatatgttgatgtgcattcttcttgctgttctgtgagtaataaagtcttttgtttatgatgcaggaatcttgtgtcttctgcctgtttccatgggacagtgtcaggataactgtaagctttaagtaagctacaatcccaaatccttcaccttttaaatttgttttcagcaattcgcctagctacctagatgtggttctctttgtgtttatcttacacacattgttcattgaggttcttggatctgcagggttttttttttttttgcagttgcaagatttaatagagtgaaaacagagctcccataaaatgggaggggacccaaagggggttgccgctccctgctcaaatgcctgggtttatgtcctgatcattgtccctccacctgtgctctcaggtgatatatgatttgactctttctttacctcctgctttagcctaatttgtattctagcgagccctctttactacctgattggtcaggtgtgagctgagttgcaagccccgtgtttaaaggtgggtgtggtcacctttcccagctaggtttaggaattcttagtcggcctaggaaatccagctagtcctgtctctcagtaccccctctcaacgggaaaacccaagtgctgttggggaggttggccgacaaccgctcttaactgcttcctgctgaattggggcatgataggggtcgtgcagttgagatttcctcaggaggggtgccttcaatgccattaacatcagagcatgggctagcaggccggtccaggggtctgcagtagatcttagtcatggacagcatctggggctccatttgaagaacgatttgtaattttacagcttcgattctggaagaggcaaacttaacaaggagcttaaacatacagggattgaaatgtatggcctgaagtgcaggggcatatatgggtgtgggcggtgaaagtggggtttcctttagaaaaactcctatatgatggggcatcaatatttccaggaagctgcattctccatggaagctcttggtaaggggagctactggtagtacagtggcatggaggaggtgcagtgagagtgaaagttttgggtgaagggttttaagtaatttccactggttagctgcaggcaaaagtatttttccttcttcggtggctagccatcctgaggggaggaaactatgtccttgtgaggttccccattctatgtcttctgctgagtactggggcttggtttcctggaggggattaccccatactaggggtccttctataagcatttctaatggagggggtcctgccttgcagctcttctggcttcaatatcctcttggtggttcccttctatttccctttcctttcctttctggtgaccccagcagtgtaagactgccacctctttaggtttctctgtacagccaagaataatctcctaatggcttcctgatgtttgataggtgttccctcggaagttaggaatttcctttctctccatattgctgtgtgggcatggagaactaggtgagcatacttagagtctgtatatatatttaccctttttccttcttctaattctagtgcccgagtgagggctattagttctgccagctgagcactagttcctggagcgaggggattactttcaagtattccattattactgaccactgcataccccacttttcgaagtcctttttctacaaaggaacttccattagtatacaagttgaggttgggatcagttaagggaacctctagaaggtcccctcgagtggcataggtttgagcaatcacctgttgacagttatgttctatcttttctttattatttggaagaaatgtggctcagttaagagttgcacaagtgtgcagttgcagcactggccctttaagtaatagagcctgttatttaagcaaatggttgcctgacagccacaagtctcctttagcagtgagtatgctgttcacatcatgagatgtccacacggtaagatctcttccctgtattattttaactgcttcagatactaagactgctactgccaccactacccgtaaacaatgaggccaaccttttgccactacatcaatttccttacttaggtaagccatgggttgcaagctggtctctcggacctgtgtaaggattcctagagctattcctcttttttctgtgacatataaagaaaagtctcgctccgttggcaagcttaatactggggcttcggttagggccttctttagggcctggaaagccgcttctgcttcaggtgtccttcttactaaatgggtattggctttctgagtttccttaattagtgtatataatagcctggctattttgccgtacctgggaatccatatttggcagaagcgtgttatgccaaggaaccctcgtagttgctttagggttttgggatgaggataagccagtataggctggatacgttccttactgaaggccctggtgcctttggataattttagccctacgtatttaacctgctgtgagcagagctgagcctttggtttggaaaccttgtagccacaggtggcgaggaaatttaagagcgtttgggtggcttgatggcacaaggtttctgaacgggcggctaaaagtaaatcatccacgtgccaaaggacaagagtgtccaggtatgagatttgactcaagtcttgggctaatgcttggccaaatagatgggggctatccctgaacccttggggtaaaacagtccaggtgagttgagacattgggttcgaaggatcttcaaaggcaaacaagaattgagagtcaggatgtacagggatgcagaaaaaggcatccttaaggtccaggactgtaaaccactctgcttcctctggtatttgggaaagcagagtataagggttaggtacagctgggtatggagggacaatggcctcactgataatcctgagatcttgctctaacctccactgtccattgggtttctgtactcctaaaattggagtattgcaggggctactgcatggttttactaggccttgggcttttagtttcttaacaatcttttggagtccttgttgggcctcgggtgtaagggggtactgcctttggtagggaaaggaggcagaatcctttagtttaacttgaacagaacaggcattctttgctcgtccatattgtccgtctgttgcccagacttcaggattaattccttcctcaagcagagggcaacaaatgggtgttcttttcctgtgttcaggtgtataatggccgctgcttttgctagaatgtctctccctaacaagggagtggggctttcaggcataattagaaaagcatgtgaaagagtaatgttccccagtcacaacttagtggttgggagaaatatctagtgactggctgtcctaggacccctcggatagtgacagatctggaggacagttttccgggacaagagagtaagactgagaaggccgtgccagtgtccaggagacagttaacctcctggccctcaatggtcaaacatacccggggctctgtgagggtgatggcatgggctggtgcttgccacaggcaccctcattcctgctgctggatcatctggttagtggcttctgactcagaggaccttcatcccctggggcagtgggccttccagtgattcccttgacataaggggcatggacgagggggcagcttatttctatttggacaatctgctttaaagtgtccttgtagaccacactggaagcaagccctattaggcattcgatttgctcagcctttctgtgttccagagcctccaaagtccgcttgcctgagggccatgactaaagcggtggcctttttcttatctcgttagtccagttccacctgctcctcctgatctctattataaaaaaccgaggttgccaagttcaatggggttttttaagttttgctccatgcctaaggcggacttttgaagtgtttttttttatgtctgcagctgactgactgataaacttatcctttaagactagttggccttcaatagagtcaggtgacagagaggtatgcttcctcagtgcctcccttagtctctccagaaaggcagtaggattttcttcctttccctgtgttatagtggacatcattgaataatttataggcttcctcctaggtttccctagtcctactagcacataagttagcaaatgtctgtggcaccaatctccatgttctgattctgcatcccaatgagggtttacactgggaactgcctgctggcctgtggggaatcattctctttcctctgttgtcatcctatcattgacctgactgagataccagagatcgccaaactctcaggctgcagttatggtggcacttctctcatttggggttagtgtctgatttagcagtaacattatatttctccatgtcagattaaaggattgtcctaacccttgtaaaacatcaatatagccatcagggttatttgagaatttacctaggtctattttaatttgctttaagtctgacagggaaaaaggtacatacactctgactgggccgaattctccagaatacatcttaggggcgtttttgccttaggggtaatgtttcctatctgaaaaaaaaaaaccgggatgccatcacccctagtcattctctgatgagcattagtgctagagcgtcttctatggtcctaatgcttattgctttccagggtgcgtaactacccatggacctctgcttatcgggttagttacgcttaccaagtagcagtcctgcaccccttttcccgcctttcttgaccacaaagaaaagggtccaggctgctgtattctagtggtcctttaccagcatgcccaacattgcctttgtgctcaggggtgagttgtagagctgggctgggttcctgagtatttcataacaacccagttgccccatcaagatacattccaataaataaaacagttcttatgcaaatttgtgtcagagagggtgtaggtaacattttgagtcaggattgagatagatttttttgattctataagtgctttaagacttggctgagtgaaaacagctcgaacatttcagcaaaccaattattaggcaattctcctaactctgcttccacaagagtctccctatcaattactgaatacccattgtggtttttttttttattatcccaagttcattgtttttttgtttttttttaattttttaattttttatttattattattatactttaagttttagggtacatgtgcacaatgtgcaggttagttacatatgtatacatgtgccatgctggtgtgctgcacccacccaaatgtccaacaatgatagactggattaagaaaatgtggcacatatacaccatggaatactatgcagccataaaaaatgatgagttcatgtcctttgtagggacatggatgaaattggaaatcatcattctcagtaaactatcgcaagaacaaaaaaccaaacactgcatattctcactcataggtgggagttgaacaaagagaacacatggacacaggaaggggaacatcacactctggggactgttgtgggttggagggaggggggagggttagcactgggagatataccattgtggtttttttctcaatcacctgggaggaaacctctatcgtcctgtcctgaagggagttcctcctaggtctggtcggacctttgtatggtaattaagatttaaatcccctgttaggaaatctgctgggttaagggaattttcagtggttaaggttaaatcacccttttctaacagaatagccccatacgagtaagatttgagttagtaagctaccattttgcttttttgacttaggataattctgaactgatgaggtgtgctcacaatgaggtttcctctaaaagttatttttctactttcttctgttagcaaagcagttgctgctacagattgaatgcatttgggccatctgcgggttactgggttaaggatttttgataggaaggctgcgggttgtcagtggtctcagtgttttcaggctgttacgcccttgtttacactgacaacaaggtagtattggagtgttatagggtcatggagaagaccttccatgatcaattataggttttaaatttaccctggcttttaaaggaatagggcacattgttttttctttactacttctatctttctctttctttctctctttgactccctctttgtctctctttctttctctcccctctgtctctctctttctctctcttttctcctagccctttacaaacttggggccctggcaagggtggtggggaatgggtctcacataactgcccatgtcgagagctgtatacctaaattgggagggataccagggacaagactctctgggttcatagcctaggggcctaaggatgcagtgtagagctcccttagatccctttggagatacaacttgctagaggaaatgaaactctgaaccattagtacctaggaggcagggatgggaggaagtagattcagaggtaaggagaattttggggctacactttcaagaaagtcgtggttgggacccaggaggtatgggtcagaaggaaaggtaggggcacacacatgggcaactgttgagtagagacttctggctgtgccatgatctgaaccagctaatgctgggagttcgggacaacagctttctgcctctagttggccctcggcttccccaggaaaattgaaagcggaagctgattctaggcagaccaacattcccaacccacaaggattgggggttgttagaaagccctttcccagcacaggcacggtggctcacgcctgtaatcccagcactttgggaggctgaggtgggcagatcacgaagtcaggaggtcgagaccatcttggctaacacggtgaaaccctgtctctattaaaaatacaaaaaaattagctgggtgttgtggtggacacctgtagtcccagctgctggggaagctgaggcaggagaatggtgtgaacccaggaggtggagcttgcagtgagccaagattgcaccactgcactccagcctgggtgacagagcaagactctgtctcaaaaaaaaaaaaaaaaaaaaaaaaagccctttcccagatagcctcacacctgagtcttaagtccagcggccacactaatcgtttttaactggccaacaggtgcctggtattttcctccaattctaaggaaggataggacagaatagcaagtgaaagtggtccaatattaccactttggatgtcccttcgtggtcaccaaaatgttaccggggcggggtggtccttgttcttagagctcccaagatcgtgggccatttccaagatggcggcaagcctcttgttctctgacctggggttcttggcctcacggattccaaggaatggaatctgggaccatgtggtgagtgttatagctctattagaagccgtgggtcatggaagagaaccatggaacccagcgactagtgttcagctcaactaggacgaacctgggcacttagccatgcaggaacaatggcgagcctttagcctgattgggagtggcaatgggcacctcgctggatcaggagtgcagcagacaccctgctggatccagaggggtggaagtcagtgatgggtctgcgacggtggcaaacagcagtggtggatggcaagcgaaagctcagctcaagccataacaaacatggaccagaagaatgtgcagttgcaagatttaatagagtgaaaacagagctcccataaaatgggaggggacccaaagggggttgcccaggttaatttttaaaagtaaaatttgagaagttttgggcctttatttcttccagtacattttctgctcattttttctctctcctctttgtctgggacacctcttacatgtgtgctgggacacttgaaatggtcccatagatctctgaggctctttttatttttcatcaatctatttccctctgttacttgaatcagatcctttctattgatatattgttaaattaactgattccttattctgatactttcaatctatttacttttgggcccatctagtgaatttttcatatcacttattttgcttttcttctctagaatttttatttgattctttgctatggcttttgtttcttattgatatttcctattgctgaatcattatcatatttttctttgattttttaacatcataataacttcttgaaatctctgctaaatcctatatatctggccccattcaaagtcagtttatactgacttctttattccccctcggtgagtatgggttatactcttatagttctttgcatatctagtgatttttaattaaatactggacatatgaactaatatagcaactcgggattctgttttatttttctgaggattgttgttttctagcaatttgtctgggattaaactgcagattctcttctctgtggtgtgtagctactgatacctctgctcagctttttattcttaatttttagcctggctttctgcaagttgccctcatgtctactttagtttagtggacagcctacactttaggagaggttgtgttaaaaaaactgagtccacagggattccacccactcctgctcaatctgtttgtgagttagggaatgctttcaaagttatagccagttctcaaatctctggctttcactttttgctagcctgtcttggatttccactatacacaggtcagagagagatatgtggaatgcttatatcttctcagataattccattaaatttttggttggtacacttcacatcccaactggaactacaaaaccgtggggttttccctgttcacatctagctggcaaaagtggttttctcttcccaccttgggttgagcctgccctctctggaggaaagctgctggttttcatggctgaactactatcttgccaagctgtgtccatgttatgggtagagactaaaggggagtcatccctggcaagcaggtcatagtttcccattgttgttacccaaagttttggagacttttcatgaataaatgcttttcaacttgttgtctgcctttgctcaatttctggtgcactgaaatggctgtgcttgataatagaaaccttacctccttttagatcactttaccctcttctatttataatgttcataaatatatcatctacatatactagaaccatagtgaaagtgttataacttttgcttctttcatcaaatataattttaaaaactaaagagaaggaaagctttttataattattcatatttttgttgtgttcttcctttcttcttgtcttccaaaaattcttatttaacatttcttttctgcatagaaaacttctgtaactattcttttagggtatatatgctggtgatagattctgttcattttccttcatctgagactgtcttaattttcctttcattcctcaagaatatttgtgctagatataggattctgtgttgacaattcttttattttagtagttgaaaaatactgtgccattttctctggcctctgtggtttctgatgagaaagctactgtaagtcaaattattttccttctaaaagtaaagtgttgtttctctctctttactttcaagatattttatttgtctttaattttcaaaagtttgatgattgatgtgttttggtgcattttggggggtttatctctgagagggttcactcagtttcttgaatttttaggtgtttgagttcccagtatcatctctgcacactgggtcctgagtgacagaagtgcccaccagaagtgatgctttttcccaaattcatccttttgaactttgtgctcccagagaagtggcaccaccttcaaactcaggttagggtcactggctcactgccatcttcagtttagaatttaaaatccagagaactcccaagaacatgaagctccttcgtcagtgtttccacagtaaattatgccccagctcaggttcagaagttgatgaaatgccaatttgtcccgtgtagtccaagcagtttagtcaggttatgagatttgtttggacaaaacatggagctctaacatttggagattcacagtgtgacctctcgatttgagtcatagttttggtacactgaattttcccatttatttgaggagaaggaaaggagagactcatttaatcaagaccaactcttgtattattaacaagactagaccacctccaaaacataaggcttccattcatatttattctctagaaattttttctctgtatctgagaatggtggtcaaaattcagtctacagatgacctcaaggtctctacctcctgtttggaagttgtctaggaaatccctttgataacttatatgtgattcatatttttcgatcataaagatttgtttcatttattacccatttctttgtggaaagaattccctcacgtgtcaatcagttataaggactcaagatgtgccgtgggaagaatgcaatctctctacctccaatcccaccatttgcttgtgagatcaatgttttaactcctttaagcacatgtattttcttattattttaacctagaaatgatatatgcttgcattacttttctcatggttatttacaactaattgtggagtaaatgaatttagccatgtttaaaaaaatttaagatgtcagcaggcaagtgatagaggttgtttaatagaagttctcttagcagcatgttaaaaataatgctgcaataatatcatctacctaaatggttactcctagcagtctgatgccaaaatctaaacaaatctagaatttttatatgtggagtgacagttgtacaaacatcacagtattcacataaatattttgtataagttaaattatctaagtttattattaagttattatccttcccatccaaaatattttttaaatcctaagacaacttcattgtagttttagttattacaaactggagcaatctttagcaagtttgggaatatgaaaataatagcttatttaggctatctaactattgaatttgtttcatatttcagttcacccttgaacaatgtgggggctataggcgctgagcctcataaaaaattagcatgtaactgttgccttccccaaaacttatctattaatagcctactattggccagaagccttactgataacataaacagttgattaatacatattttgtatgtcatatgtattatattttgtatttttataataaagtaagctaagtaaagaaaagattattaagaaaattgtagggaagagaaaatatatttacagtactatactgtatttatggatactgtaagtttatgttgtctgtttaaaaggtgaattgtccatctgaaatggtgggcagctgcagccgcaaacctcaatttatggtacatatcaagcaattcatctttttcttgtaatggcatgacttttctctgcttgttgggagcacttccagcatcactagtggcactttttatggatcccacggtgttattcgaggtttctagtattgcactaaacacaatgaaaaatatgtgagagccatgagagatcagtttttactgtgacacacaatttactggaaagatgaactgctcacacagagatgatgttcgtcacacagtgttttaagcagattcttgcaacacttgagctccccacaatggcaacagaaggtagctatgaaatcattacaatagtacagtatgttctacggtgaattttatgaagttatgatttaatactgcatctttatgtttatttccatttctctcaactgcaaatggcactatgtatagtctgtgtttgtgtaagttttgataaattttaactttttataatagagttacatatattttatgttagtaaacaataaaatagactaatatctacatatattttatgcattcatgacatacctaactttttcttagtattttcaatatttctaggctgcatggttcatctgcatgttttttcaaattgttgcaaatttctaaaaattttaaaatatatatatattttttgaaatccacatgtaagtggactctcaaagttcaaacttgagttgttcaaaggtacttgaattctctccagcctttctctttctgtccttaaatacatcaaatatcctaacattttaaatggagttcctaccaattatattcagagaaacacagtatgaagcatgaaaagtacctatatggaaagtggcttatcacttcatagagatttttagaaagtaatttcctttaactttattgggaaggaggttctactcaaaaactgtttcctggagtagtcagtcttaagctgctgtatgtgttatgcttcttaccaaagttcaggagggcactatctgtttcctcaggatggtgtcaaaatggagtgttggcagtgttccttatgtgaagtaaagagataacagctagaaagctaattaaaatagagtagacttgctttaaggaagcgggcaaaaccttttccttcccagaaaaatttcctactcccacccactgcaaagacttgaaacaatagagtcagcaaaaagaatggcaactttatgttcccttttatgaaatttctaattttgtttccttaagtctctacctcactctatgttgtcttgggtaggtaagaattgacaaatgcttattttcctagtagtggtacatttaaaaacaatctcccttcccctaatgttccttttcaaaaactttattccagccaaaagagtgactttacattgggaggatcttaagacaataacagcgagatagccttagaggaaataattgccttttgtttcatgaatttctctaacttagtgatatcccgattcctgatttgtagcaagtcagaaacactgaaatctccacttaggaacattaataatgtttttcctaattcactggatttgattattgcacacagaagctattcttcccagtatttctttctttctttttgagacaggttctcactctgttacccagactggagtgcagtgacacgattacagctcattacagcctcaatctcccaggctcaagtgatcttcccacctcagcctcctgagtagctgggactgcaggtatgcatgccaccacacctcattaatttctgtgttcttttgtttttttttttttgttacagacaaggtcccgccatgttgcccaggctgttctcaaactcctgagctcaagtgagcttcctgtctcagccccctgaaatgctgggattacaggtgtgagccactgtgccagtatttcccactataatcaagtggtgccaccaccatttggcttatatttctacattaaaagggaagtgaaaagagaaaggacaaagaatcaatcataatcttgggcataattactgggtcatcagaaatgttaaagcatataaggacaaaagaggaagtggctgaaaaagtaaagtacagtgaaaaataaaaggaaataatggggaaaaaaactatgactttattagaaactgatatataattagaatgcagatttttggtgagagattagtggtaagaaaataattgtaagtaaatatgtgttatttatttatagccattcttattttaaaaaagatatgtggtggtaaatatttatgtaaatgtcttcctaattgaaaaacacaatgaaacaaaaatagtggcatttctttttaacagtgttgtgtttaacaatggaattgcttcctatctgtctggaaaagtgaaggtatactaatacctcacacttgtataacctttgtgattacagagcattttcccattcttttgattttcataatagcttcattaggtcaatagatcttactctactgtgaaggtgaggaaacagcccatgctgctaaggacttgcctaaagtagcgtcattaataattatcagcaccagaactagaattcaagtctcctcttatttaggatttttcttcaactgtttggtctctcaggtaacttttccaagatcttttccagtttcactagttttagctaatatataaacatgtcataatatttttatagccaaacagtgctgtctgagattttaaatcttgagacttgagaatgcctgaaggctagtgtgctggatattctgtattcattctccattctcctccaccctgctctgggtcctgagagaccggccagagtgaactgcatcagggggcttctggttaggttcagcaggagattggaggctgggagcagagcaagatctggtatttattcctcagctccttccctgctgggccatggatgagtagtggctgtactctttaactgaagatgtagccgaccctctgggccccctacccatgtaccctcagccctcaccattccttatgaatggtggtggcttcttcttttgaaaatacctgccactctctgcctgatggctttttctggccatagaaacacgcttagcccatgcacaggaccggccagaggttctggatagttgctttctccagggaacaccccttaatgaatgatgtgtaggaactggtggataaatttctctctttctgttcccctgagttggaacagctatgagctgtattctacacctgtttcccagggggtccctatcaagacagagccccaaatgctgagtgtgtctaacattggatattcttttagttaggaagaaggtaagaattagaggagtggacatccttttttttttttttttttttgacagagtcttgctctgtcgcccaggctggaatacagtggtgtgatctcggctcactgcaacctccgcctcctgggttcaagctattctgaagtctcagcttcccgagtacctgcgattacaggcacctgctaccacgcccggctaatttttgtatttttagtagagacggggtttcaccatgttggtcaggttgaccttgaactcctgacctcaggtgatccaactgccttggcctcccaaagtgctgggattacaggtgtgagccactgtgtccggccagagtggacatcctttagtaactgcaacagaggcatgcttcgaatactatacttttttgagacacatgagataattaaatgattgacaacaatactaattaggccagcaatgattacagtgctattgccaccataatgccagtacaaggttggggttattggtggctgtcaggatggtggctgttagagaagagcttgttctgccctagctgtattcttcatggaggcaaagttcttgcaatttttctgtagtgccaacctgatgacacactaaccatgtacgtcttagttacaacaaagctattccacacccagccatctaacctactttgtttctcatctcaggcattactgtgacaatatttacactcagttgtagcaaaaataaaaattttctttttacatatcaatgaaaatttgtaggggctgctgggagggatttgctctctcaaatgcagtggtcgtgaatccccatgttaggtattttaggaaagataaaataagtaataaacagactcttcccttatcaggggaacccgcccccaataattcaacgttatttcacgtaggttcttttctatttccctaagtgttggtcagtcggagaaataaagggaaagagtacaaaagagagaaattttaaagctgggtatccacgggagacacacacatgtcggcaggttccatgatgccccccaagccgcaaaaccagcaagtttttattagtgattttcaaaaggggagggagtgtatgaatagggtatgggtcacagagatcacatgcttcacaaggtaataaaatattacaaggcaaatggaggcagggtgagatcacaggacgggggcgaaattaaaattgctaatgaagtttcaggcacgcattgtcattgataacatcttatcaggagacagggtttgagagcagacaaccagtctgactaaaaatttactaggtgagaatttactcaccgtaataggcctgggagtgctactggagaccagggcttatttcatcccttatcttcaaccataaaagacagacattcccagagcggccagtttagagacctacccctgggaatgcattctctttctcagggctgttccttgctgagaaaaggaattcagcaatatttctcctatttacttttgaaagaagagaaatatggctctgttccacctggctctcaggcagccagacctaatggttatcgcccttgttccatgaacatcactgttatcctgttcttttttcaaggtgcccagatttcatattgtttaaacacacatggttacaaacaatttgtgcagttaacgcaatcatgacaggatcctgagtggacatacatcctcagcttatgaagatgatgggattaagagattaaagacaggtataggaaatcacaagagtattgattagggaagtgataaatgtccatgaaatcttcacaatttatgttcacagattgcagtaaagacaggcataagaaattataaaagttttaatttggggaactaataaatgtccatgaaatcttcacaatttatgttctcctgccatggcttcagtcagtccctcttttccgggtccctgacttcctgcaacattctctctggaactccaggtttggtagtaatggaggatggggtgaggagcgaagagaaattctgtgtgggaagaaatgataacataagtgtgagtggcagaattctttgttaagatgttaattattgtgggttcccagtcctaccctggctcattgtcaaaattatgcaagcttccctaaagcaataaggtaatagggaagaataaaggggtacctttgaagaccaagaaagagtgaaagttttgggtcactgggaagggatgaaggttcatgggtctatgggtaatggggactcttgcctgttctgtggtcatgtcctgctgggtaatacgtcagaaaggacagctgcatggtgtctcagagatgctccactccaagcaccagggcgtccagctgaggcaaagccccctcaccacactccccctttcctacttagcatggggaaagaaaggttgggcagtgagaatatcagatgggatcaagctaggtgtgagattagaaacccttctcccagtttctatagatgcactttccccagattctggtgtaagccaaggaggtaagaggactccagtaatgacagattgagtttcttgccagctcagagagccagagacttgagatgaatttaagttgatataaagaaaataaagagcagaattttttggacacctatatgtggtggattaagatggaacttgctccatgcataaaaaacagagacaaaaagggcagaatatggcaagggctctaggggaggctaagcaatggaatgtatctataataaatcatgatatgttatttgcaatttggaaaccttgcaggctcttctccacagagcttcttccagctgggcagaggaaagaacaattaaacggagaagggggaaggaatgattttctcttggattcttttcttgcttgctccgatttcataacataaagtacagtaacaagtaactgtacatgtagtaaatgtttattagtcaagtatgaagaaaatacttagtctgttaattccttcttttatggtagtcatatgtcacactgatttttatgtcacaaaatccatattgcccatcctccggattatagagacagacacaacattgtttggtgtcagtgtcaaggcatcatggcacacagggtgaagatcccttcgctcttttagttctccatctcacagactcctttgtcattgtgcaggcttcagagcagagacctctgtgcaatttctgtttttcatggaagaaattacagttgggtgggtagggttacaggcattttctacattgaatctgtatttcctggattccaaagcacttgatgaaaatagatttttttttttttttttttttttagacagagtcttgctctgtcttgcccaggctggagtgcagtggcacaatcttggctcactgcagcctccacctccatggttcaagtgattctcttgcctcagcctcctgagtaactaggactacaggtgtgtgccaccacacctggccaattttgtatttttagtagagacggggtttcaccatgttggccaggctgttattgaactcctgacctcaggtgattctcccgcctcaactgggattatagacgtgagccatcatgcctggcaaaaatagatttttagtgtttggaaatcaagatgtgtctttcagtcaaagtcaaaagaaatctatttgtttccagagaatctcaagttatactgtgtttgtcattgtgcacaagtatgcgtagtatttcatagaagatatcatttaatctgattgccaaagcagataagttatttgtaacagtagttgatgcaggtaaattttaattaaattctagacctccaattggcttttaaaaccttttaaatatttaatacaattatttatttatttatttgtttgtttgtttgtttatatgagatggagtctcgccctgttgcccaggctggagtgcaatggtgcgatctcggctcactgcaacctccacctcccgggttcaagtgattctcctgcctcagcctcccgagtagctgggattacaggtgcgcaccaccatgctcggctaattttttttatctttagtagagacagtgtttcaccgtgttgtccaggctggtctctaactcctgacctcaggtgatccacccaccttggcctcccaaagggttgggattacaggcatgagccactgcccccggctgactttagtttttaatatggaagattgcctgttttagctgaacaatgaatttgaaaacaataggagttgttacgtactttggtctattttagaacattttcaaagtttttttttttttttttgagacagagtctcactctgttgcccagatgggagtgcagtggcatgacctcagctcactgcaacatccgcctccctggttcaaggaattctcctgcctcagcctccagagtagctgggattacaggctcatgccaccatgctaggctaatttttgtatttttagtagagatggggtttccccatgttgcccaggctgctctgaaaactcctggcctcaagtgatccacctgcctcggcctcccaaagtgctgggattacagatgtgagctgtcgtgcccagctagaaaattttcaaagttttgagcaatgtgtgtgaccaattcgtgtgctgaggaggagttttgcttgggaatggtacatctattaaaagtttctagctaaccttttcccctaaaatgtttattaaaatgtttaatatttaatagaaataatatgaaaatacataaagaaaaagttaataaactcctttcccacccctccagccattttctcttctgttcctccctcagaggattcttgttcatcttttttcatgctcttgcatgatgtgcatatataggtttttgttaaaatgtagcaatgatggttgcacgcacaccccttcagatctcttcactatttctgtgcactccaactcctggtgtagttatcctcccaacagcccagccctgcatcactttatgagcaaatgaccctcaggttactggaatgtgcttcatttatgcacatcgggggccataagtgcctttgaatttatgcttccaccccccaacccttaactaatgactgataggtgcaaaaatataaacttcagctcttgaccccctcatcagtataatttagtcaattactcccagtagtttctcagctttgttctgctttctgacactaaaaacaatgctataatataaaactgtctacatatattctatatatttaccaaaagtaattttgtctgtgtgtgtgcatgaaagagagcctccacttgagtctactgaagttgaactaagccactttctacaatattgagataaagtagtggagctagaagtatgaagaaggatttatggggggttaggcaaatgaatctttgtcctctcaacaagtatttactgttttcctactatgtgcaggctctgtgtacagtctactattcagtgcaggacaaaacagaaatggttcctgcccttgtggagctcgtctagtgggggagtaagatattaagcaatgatgtcatatgtaaatctttgcaaattgaataagtgctatgaagaatgaatagaaggtgctctgtgagagttaattgggggcctaatttagaaatggaaaaacctctctggagaattgacagtagaaaaaaaaattaaaactttttttttttttgagatggaatcttgctctgtcccccaagctggagtacagtggtgtgatctcagctcactgcaaactctgcttcctgggtttgagcaattattctgcctcagcctcctgagtagctgggattacaggtggctgccaccactcctggctaatttttttgtatttttagtagagacggggtttcaccatgttgtccaggatggtctcaaactcctgacctcaggtgatccacctgcttcggcctcccaaagtgctgccattacacgcttgagctgctgcaaccggcctaaaaattaaaacttttccccaatgtttaaattatttacacagccctaaaattcattctaaagaattttgttttgtatttatttgaattgaatagacttggaattgagttttgctctaacttgcaatgactgtggaacagccacctttgttgcagaattcctctcaaacccttatgatggaacaacagaaaatctataactatgataggtggccaaattagctggaaaaatgtttgacttgtaaacgtatcatgctggggtacctggagcatctgaatcccaccaccagcaccaccactctgtaagaggaaaacctggtggaacaaatcagttgagggctgggacttctgggtagggagaaaggaagggagggaagatgaaggagaccaggagaggatcccaatgttctggaaaagtccctggcatatggtaggtgtccagtaaatatttattgaataaatgattgcgtgaatgatgctcagcagggatatggatactgagctcacatggactgctcagtagcctcatagggagaaaacactgttttgcattagcccctggaatctctgtgtgtgcatggttgtctggtgattagattggtaatgtcctgtgcctgccttgatttctagatggtaagggctcagataagaatatgaaccagcttttaccaggatggggtaattgtcagatattaatgaagtatggcagtaggcaaacctagggccaaaactgaagtgagggaggccccttgcttggccagatcaggagtcactgtccaaaggcttaggtcccatcattttcctgcaccaaagctggatatagtgggcagtcagcagggagccaaggagttgtgtgtggtcagggtcaagaaaggcaaaattcgtcagagaaatgcataccctgttggtgagatggagaagacctattccttctcacctcaaaccaagactcaccataaataggctatgcatactcatgatgatctgactattttgagtagcttgccagaagggtaagatgagaaaagagatctaatttacactttttaaaatgacaattagagggagatcacaacagccaaagaagattacctatttattaagcacataggcacactctggtttaggtgctgtgggatgttgaaggatttagatgaggaggagagaaaaagaatttgcactcagactcgagaatttgaagtcacactttggattgtatacacaggtatacttcagagatattgcaagttcagttccagaccaccacaataaagcaagttacacaaattttttggtttcccagggcatataaaaattatgtttacattatattatacattatattatagtctataaagtgtgcaatagcattatttgcaaaagtacaatgtatataccttgattaaaaatactttattgttaaaaatgctaatgatcatctaaaccttctgtgagttgtaatctttttgctgttggaggattttacctctatgttaatagctgctgactgatcagcgtggtggttgccgaaggttggggtggctgtggcaatttcttaaaagaagacaacagtgaagtttgccacatcaattgactcttccttttatgacaatttctctgtagcatgtgatgctgtttgatagcattttacccacagtaggactttcaaaattggtgtcagtcctctcaagccctgctgctgctttatcaagtaagtttatgtaacattttaaatcctttgctgtcatttcaacgatgttcactgcatcttccccaggaatagattccatctcaagaaaccagtttctttgcttatccataagaagcaagtcctcatctgctccatttgtatcatgagatgtagcaactcagtcacatatttagactccacttctaattctagttttcttgctatttccaccacatctgcagttacttccttcactgaagtcttgaacccctccaagtcatctataagggctggaattgacttcttccaaattcctgttaatgttgatattttcacctcttcccatgaatcacgaatgttcttaatggtatctagaatggtgaatcctttccagaaaatttttgatttactttgcccacatccaacagaggaactatctatgatggctacagacttatgaaatgtatttcttaagtaataagacttgaaattacttcttgatccatgggctgcagaataaatgttgtgttagcatgcataaaaataacattcatcttcttgtacatttccatcagagctcctgggtgatcaagtgcattgtcaatgaacagtaatattttgaaaggaatattttttctgagcagcagccatcaacagttagcttaaaatattcagtaaaccatgctgtaaacagatttacagtcatccaggcttttttattccagttacagagcacaggcagagtagctttaacataatcctttttgtttttgagatggagtctctgtcacccaggctagagtgcagtggcatgatcttggctcagtgctacctccaccttttgggttcaagtgattctcgtgcctcggcctcccgaatagctgggactacagacacgtgccaccaagccctcctaattcttctgcatttttagagatggggttttaccatgttggccaggctgggctcgaactcctaacctcaggtgatctgcttgccttggcttcccaaagtcctgggattacaggcgtgagccactgcacccggcccatttaacgtaattcttaaaggccctaggattttcagaatggtcaattaacaatggctttaacttaaagtcaccagcttcattaggccctaacaagagagtcatcctctcctttgaagatttgaagccaggtattgacttctcctctctagctatgaaaaactctactggcccccagaggatgaagggcctaatgtggcatccaagatggcatcttcttccaaaagaaggctatttcatctacattgaaaatctgttgtttcgtgtagccactttcatcaatgatcttagcatgatcttctggatacctcactgcagcttctccatcagcacttgctgcttcaccttgcgcttttacattacggaggtggcttactttcttaaacctcatgaaccaacctctgctggcttctgacttttcttctgcagctttcttacctttctcagccttcatagaactgaagagagttaaggtcttgctctggattaggttttggctcaaaggaatgttgtggctggtttgatcttctatccagacctttcagacattttccatattagtaataaggctgtttctctttcttatcatttgtgtgttcactggagcactgtgtttactttttttaaagaaattttctttgcgttcataacttggctgttttctgcaagcagcttagcttttagcctgtctcagctttcgacatgccttccttgctaagcttaatcatttctaacttttgatttccagtgagagatgtgtgacttttccttttacttgaacacttacaggccattgtaaggttattaattggcctaatttcaatatattgtgtctcaaggaatagggaagcccaaggagaggaggagatagtgggacagacagtgagtggaacaatcagaccacaaacagcagttatcaattaagttcatcatcttatatgggcatggttcatggtgccccaaaacagttacaattttaatatcaaacatcactgatcccagatcatcataagaagtataataataatgaaaaattttaaatattgcaaggattaccaagatgtgatacagagacatgaagtgagcacatggtactgcaataatggcactgatagacttgttcaatgcagggtcgctacaaaccttcaatttgtaaaaatcgcaacgtctgtgaaacacaataaagccaagcacaagcaagtggagtatgcctgtaagaaacataaaatatgaaaaatcagcagtgtgaggcattaagcagttcccaggttgcttggcacttatgaaagtctcttagaatttggaggagagagggttagctggaagacttgaaagattcaaggtttgagccagaccctgaaggatgagctgagacaatcatcttaggttaagtaatgatctcaaaagtataaaaattgctattactattatctttttctgttttcctatttcttcagactttgctgcccccagaggatgaagggcctaatgtaaaggagaacaggaggcctgattttggcattacctcaaagatttgtcacccctggctgatctctgcaaaggcggaggcgttaacagcaacataggagcttcctgctgtagactgttctggtattgtgggatattattgtcctcaaaagctgggtgtgtgggccatgctgataaggtcatcggcattagtctaagggccatgtgttcttcaaaactttccactgactcttaggcccagcaaggtccagaagtagaagacagagatttatgctgtttggagtcttgattgcttggcaagtattaatacaattctggggcacttaacggttggttagtgtagtaaattttgcttaacactagcttttctgcatctcagagctactttaagttgtctggcaatgttcccaaataagggtaaccccgtctggagaagcctaggccttttccttccttttgttattttttttttcaagtgctgcaaccagcagtcgctactccttcctgtcctccccctagagttgctgactgctctccagtgacatgtatttggaaactttttaagatactagaaaatcaacttagaaactttctttttctttttcttcttcttcttctttttcttttttctttttttttttttagaccaatgggaatattgtgtgttgtggatggaaagatttgaatactactatgttttcacattgagttcaatgtaacaaggccatttccgtgtcttggcacacagcctgagttaactttgctttgctggatgtggatacaatgaattctgtttgaacaagaaatcatgtgtaacaaatgcttttgcaaaatcatgtcgtcattaaagcagttactttaataaagatgggcttcacaaggggtttccggtacaacagctgcagttaaatatctatacactgttaacatattttttaaaataagcttttaattatagaatagttttcaatttacagaaaagttatgaagatagtacagaaagttaccaggtactctctacccagttccctgattattaacatcttacattagtgtggtacatttgatacaataaatgaaccaatattgataccttaatatcaactaaagtccatactttattcagatttctttagtttttacccaatgttcttttctgttccaagattccaaattacatttaatcttcatgactccttaggctcctcttggctgtgagaatttctcagactttttatttttgatgaccgtagcagttttgagaaatactggtcagaaatttttgtataatgtccttcaattgggatttgtctgatatctttctcatgattaggctcgagttatgcactttttggaggaagaccacagagtgccattttcatcacatcataccaaggatatgtgttatcaacatgatttatcactgttgatgttaatctagatggccttgctgaggtagtgtttgtcaggtttttccactgtaaagtcactctttcttactctttttctctgctgcactctttggaaagaagtcactatgcaggccatacttaaggagtgaggagttatgctttacctcctagagagtggagtatttatgtaactcatttgaaattcttctgtatggatttgtctattctctcccatttgtttatttaataattcatttgttaaatattctatttcataaatacactaatagtctatttcagtatagactcgtggatatttattttatactttggattatctttgaatatggttctattttattgttcaaattattctaattttggctattggaagctctattggctcctgtgtcactttgacacaccccatcattgtaagctttttttttcttaattactttctggccccataagatactccaggattgtcttgtaatatttcctgtccccagcctagagtcacctatttatcaggggaattctggttccttttactggagaacggttatagaaacaaaaatctgggggttagatgtgcttattgctactgcagtatcattgcttataggcccactctgctgacagagcaagaaaatatagatgtattttaaaccatatatatatatatatatatatatatatatatatatatgcacaactataaatagttctacatttattcatatgtatccctattaagctaaacctgagttcatactgatgtctctaacgttaatccattaccacatggatcattctagccatttccccttacttgtctataaccttccactctaacagtgagaagcctgactcctattgtctgtcatccatttacataatttctgattccagtatacatgtatagtggtttcagaattatgaatcttgggagacagagtaatgtacttttacacagttccttttgcctttggtcctgtagactttactcacatctaaagtgacttggggccgagagtggggactcatgcctgtaatcctagcactttgggaggccaaggcaggtggattgcttgaggccaggagttcaagaccagcctgaccaacatggtgaaaccccatctcaactaaaaatacaaaaattagccaggcttggtggtgtgctacttgggaggctgaggcacaagagttgcttgaaccagggaggcagaggttgcagtgagccaagatcatgctactgaactccagcctctgtggcagagtaagactctgtctcaaaaaaaaaaaaaaagtgactaggtcagcacccttttcctctacctccctctgtgaggttttttcacacatttgtaatacagttccattattttgtcagaatttaaatttcattctgggctcccttgacttcctgaataatttttgaaaactttgtatgggttaaggttcattctttgtgatttaaatttctgtagattttgacaaatgcatattgtcatgtatccaccattacagtatcatactgaaaaattttatcaatctgaaaatatcccctctgctttacttattcgacctttccctaccctgatgaatctttggtaatcactcatttatttattgtctctctttaaagtaagcagttttttaaaaaatttaaatttttaaaaatatttttaagttttggagctctaataagttgattggtctttcatagataatgagtactttgtttgaaaatgagtatctttgaccttaaagaaattatagcttttatcagttatacttgcaattcacagatttggatttgtgttttgaagcagcaataacatcttactttttttaaatgtttttttatttttagaaataaggtcttgctctctttctcaggttggagtgcagtggcacaatcatagctcactgcagccttgaactcctgggctcaagtgatcctcttgcctcagcctcctaagtagatgggatatagacatgagccaccatgcccagctaattttttaattttcattttttaaagacgagatccattatgttgtccaggctggtctcctggcctcaagcaatcctcctgaattggcctcccaaagtgctgggattacaggtttgagccactgcacctggccaatcttaccatttttgatgaagtgacagtcacttattatctctgcagacctttgagacatttagacaaattgaggcacttgatgtgggagtaggataaaggagttaaaggggatatttcaacagaacatttatgtaagagaatccactcatgcaaggcaagagagaggaagtagttatagctaaaaaaactaaggtaatgcctacacagcactgacttcattgagtactagcattgggttagatatttgccgtagcataggatcttcatttcagttcagcaaactctcattgagtgtctgctgtgcttgaagctgctgtgctgtgtactctaggcttaccttctcctgctgccacgttgggttgtagactttcactttggaagagttggccattctgccacattcaagggcttccccaagctcagttagggcattcctccctgactacctggaaataggaagacatgggtgatctcatgtcatacttcactccctctcccaacatggcctcagtcccacagctgctggttgaatacatagaatcacttaactttgggaaaaggggtggagaggccctttgtgctatagaagggaaaggactttgactctcatttccttcaagtaccgttaggttacttctgaaaaataagtggaagatatcagagggggaaaaagcaagagacacaagtacaaaaggcaatgttttgtttaatctgaacatagattagtgcatagtgaagaggaagagaactcacccttactgagtgccacctatgtgccagagtctgtgttgggagttctcacatatttattctcttttttacctccaacatggctttgtgaagtagattaaaaaaaagacctttattttatggatacattggggttcagaagggctcgctaacttgtctaagatcatacaaaaagaattgaatccagatcttcttaatgctctggcagcactctaaaatcatcttggcctttaaaaaaaaacgtggctgaaacctaccccaaactcaattaaattccaatctctgagggttgggatgggcattagtattttttataattgggccaagtgattatagtgtgcagctgaagttgagaaccatggctctgactaaagaggcagtgccactcctactactttccacaagaagggacggggcattttttgaacgagtgtgcattctaaatactcttggaacactttcagatccatccctttttctctgctcctcctaccctgcaccacagtgtccttttcatctctggatatctgtaagtaagcagatggaatgagaagagaggttgttattgatagtggagaaatacaaattcaattgaattaatttaatcagcattcctcttttgataaaacacgtatatgtagtgctgatagactgtcaaagcacaatgtcaagtagtgtcaagaaaatttgatacagttttccaaatttgttgacaactttggtttgttgaatatgcattcaccaacaccaaatagtactgacttattatcttggtttgtagggatcataaaaaagatggggcatggatctattgctggtaggaaaataattttgaattcctgagattagatttgttaattgccatataacatgtaacattttaccccaagatttttgaagtattgcgatttaccatatctatggcatctcaattataaaaatccattattttacagtctccttttaaccttgaaattgaccatgagcatcataatattttgattcaaatcaaaatgttcaaatgtcataatattttgaacactttgacatacgttatgaagaacctcttcgtatattcatctataactaaagttgaatacataaacacaggcattcttggaattggcaaaacatgtcatttcatacaatagttactttgggcatttattttaggatacgtaaaaccagagtaccacctctcatgagttttatcaatagaattctgttttaatggagaactggaaacaatatagagaacagaatgctcatcttccaccctatccgactagctctgtcctttctgtcccccctatctggcccctaatgatgcagaaactaccattactacttagtccaatttatgtggttcctgcttggtcactgttgggtttatggagtgtgccttaaaccatcaaaccacaatagcatattgcatattggacattgtgtatggtccctcctgatttctacatctgatgttaagttccacagggaaatctaaggaaaccttgatattgctgcctgattattacacaacagacaaattgcatggtgaatatacttttcttgcttacactggtttaacagttttttttggctttgatcagtttattgttcaattacttatatttttctggcaaatgattttttttttttttgaagtggagtctcgctctgtcgcccaggctggagtgcagtggcaccatctcggctcactgcaagctctgcctcctggattcacaccattctgtcacctcagcctcccaagtagctgggattacaggcatgcgccaccatgcccggctaattttttttgtatttttagtagagacggaatttcactgtgttagcccgggtggccttgatctcctgacctcgtgatccgcccacctcggcctcccaaagtgctgggattacaggcgtgagccaccgcacccggcccaaattatttcttttttctatttgcccctaaagtgaaatagcctattttgtgagtatcatcttgccaaattatagcattatttttaactacccaagtccattttgcatatgtctactgactcaggaaatattcagttacatttcttaaataacagtaataataccccatataaccactgcatatcatcaaataatctcccactttttcaccaggattcttttttgccttttattgcaaaaaatttcaaacatagaaagtagagagaataataaaacatatccccatataccatccagcttcagcagttataatgtcatccctaatcttgttttatctgtacctcacccattcctcctctttttgaaactaatctcagatttcatctgtacatatttctgtgtgtgtctccagcagataagggctttggaaaaattatagccacaatactactatcataccttaaaagttaacagttctataatattataaaatatctagtcagttttcaaatttctttgattttctttaagtttcttttacattggtttgaatcagaatttcaaggtcctggtattaattttattggtatatcttttaaatctcttttaatttataggtaactcattctcttttttcttctctgcagtttatttgttcaagaagttgagttgttttattgattgttttagtctagtctcctacaaactggattttactgattgcattcctgttgtatttttttaacgtgtttatccgtgccctcttttccccacaaactggtattaggtttagaagcttccatttttgggaagacagcttcagaggatgtgatgtgtgcttccatcagaaggcagagaatgaatgtttatacccccttttgttatgtgaacagtcattgatgattattgtttatgttcattcctttgtgaggtattgcaagatggtgatacccaaatgctaccaattttagtctttcattatctggaatactttaaagacacttttccccatcaatgattttgttgtcctggggtacattttgtgcagcaaagggaggttgagtgttgctattatcccccttgtgtgttttcacaataatgaattcgttctaaaggtgaacagtgatttcttcatagggtcattatgactatgtggatctcaatatatctgatacatttcaatccattgcagttattctttttattgctgctcaaatgtcttcttttcttatactttggccagtaggagccacttaaagttagctcctgaatccttttgacacaaccctagtaattttagatagtgtccttgctttctggtatacctcctgccccagacttggttagctatttttccaaagggccttaggccattttagtagaaaatagcatttacaaatagccatcttggtgctgggatagaaggtaatgatttagtaaaaacctatagggaaggagggaatgagccatgtggatattcgggaggacagcattccaggcagaaagaacagcatatgcaaagacttggaggccagagctgagggagcaagaagaggacagtagtaggaaagaaatagaggtgaccaacttcctggtgggaagttggaaggactttggcttttcttggggtgagatggagccttttataaattttgagcaaaagagttccataatcttttgttttgtttaatttttaactgaattattatagtttctgggttgaaaataggctgaagagtttgaagagtagaatctgggaggagaccagtgaggaggctatcacaataatacaggatacaggtgagagatgatgtggcttggatcagtgtggtagcagtagaagtaataagaagaggtcaggtcctggatgtatctggaagataggaaccgctgaatttgctaaaggattagacttggattgtaaggaaagaggattcaaatgtgactccaaggtttaaggcctgagatgttaatgaaattataaaacatgataacacgagtggcatctcttttgtgggtcagcacagtgtttgtgtctgtgggaaaggagcggggatgggtcaggcaaaacttcacgggggatgatgtggtttggatatttgtcacttccaaatttcatgttgaaatgtgatccccaatgttggaggtgggacctggtgggaggtgtttgggtcctgggggcagatccctcatgaatgacttggtgaaaatgagttcatttgaaatctggttgtttaagagtctggcacctcccctttctctctcgtgctccctctcttgctatgtgatgtaccagctcccccttcaccttctgccatgattgtaagtttcttgaggtcctcaccagaagcagatgctggtgccatgcttcttgcacagactgcagagccatgagccaattacctctttataaattacccagtctcaggtatttctttattgcaatgcaaaaatggcctaacacaggggaccagatatttgagtcatgaaagatatataggaggaccaggtggataagaggggaaacagcattctgagcagggtaatagcttgtatacattcagagttgtggccaggcgcggtggctcacgcctgtaatcccagcactttgggaggccaaggtgggcagatcacgaggtcaggagttcgagaccagcctggccaatatggtgaaaccccatctccactaaaaatacaaaaattagccggccatggtggcacgcacctctagtcccagctacttgggaggctgaggcaggagaattgcttgaacctgggaggcggaggttgcagcgagccaagatagcaccactggactccagcctgggtgacagagcgagactccatctcagaacaaaacaaaacaaaaattcagagttttataaggattatgggtcctggaattagattcagtttttggagtgcaggaagcctataacaggaaatgagtttagagaggtagagagagtccttacatattcgatgacaggaatttaaattttattttatgcatgataaggagactagaatttttaaagtctgccaatgacattatcagatatcgatttcagaaagatgagagagtatgcactatggcagaagtgacgagaatggagagaggagatgaatttgagagatcttaaggtatagaaacaattggatttggtaaacaataagatgtgggatgtggggaggggtctaggaggaccctgaggttgctgggttgtgtgactaggtggatggtagtgccattatctaatgtaggggttgggcgcagtggctcacgcctgtaatcccaggactttgggaggccgaggcagcctatcacctgaggtcaggagttcgagaccaggctggaccacatggcaaaaccctgtctctcctaacacaaaattagccaggcatggtggtgtgcacctgcaatcccagctactcaggaggtggaggcacaagaatcgcttgaacctgggaggcagaggttgcagtgagtcaagatcgtgccactgcactccagcctgggcgacagagtgagacatcgtctcaaaaaaaaaaaaaaaagtagggaatactggtactggatgggagcagatttggaagtaaagatacagagtacagtttggatgctaagtttgagctgcttgtgggatattctcttgacacccagtaggtggatggaaatatggatctggtgctcatgggagtggacttggcagaaatgtaaaggcataagaagttatgacctaggtagaataagtgaagtagggagagaaggcaaagggtgaaggtctagggaataccaacatttacaagacacaaaagttgactgaaaaggagccatcatacacagatggaggaggaaaatcagacatgaggggggttctggaaaataaggagagatcaattttcaagaaagaaggaaggccaacaatggcccatgctacatagatccaagaagataaaacacaaaaattggtctttgctttacaggccattggcaatcttagggcagtttcattggcatggtgcggtgagaaacgggaatgcaatggaaggaggagtaaatgaatgaggagagaatggaggtgatgaaggaaggcaaaggtagaccatggtctcaagtagcttgtttgtgaaggagctgtttttgttttaattaattttttaaaaattgtgataaaatagacataaaagttactatattgctgggcccagtgtctcacgcctgtaatcccagcactttgggaggccgaggtgggcagatcacctgaggtcaggagttcgagaccagccgcctgaccaacatggagaaaccctgtctctactaaaaacacaaaattagctgggtgtggtggtgcatgcctgtaatcccagctactcgggaggctgaggcaggagaatcacttgcacccaggaggcaggggttgcggtgagccgagatgctgagatcgcgacattgcactccagcctgggcaataagagcgaaactctgtctcaaaaaaaaagttaccatattaatcatttaaaatttatttttatttttgtagagatggggtcttgttatgttgcctaggctggtctcaaactccaggcctccagacaacctactgcttcagcctcccaaaatgctggggttacacggtgagccaatgcacctggcccatattaatcatttttaacagtatacttaagtatttttaagtacattcacattgttgtgctgccaatctcaagaatttattcatcttgcaacactaataattcataccattaaacaacagaatttgtttttaagaatgagaatcacttaaatattttatatgcatagggggatgaaccggtacagtgaaagaggatgaaggtgtaggaaaaatgaaaattctaccattctaagaactttataagaccatttcatcattaaaagacagacaaatatctttacccctttctgacaactccttccatctttctgagtgcagttttaattttctactttctattacaaaaaaaaacaataaaattgatgataattttttgttgagaaagacgatttattttttaagataaattctgaggcctttagaaagatacacacaaactcccatctcttttataattattcttgtatgaattggtgataatatatacttaaccatagtattttcatgatgctgaggagggtgcgaacctggacaacgtgattaaattgtagcacagagcatattaccataaaaagcattaaatgttgtcaaaaggctcatgtaatatgaattaggggttaaaactatgtttctattactccatattcagtttggatgaacttcaaatatttatgaagtgctagttactataatgagattttacctctcctggttaaaccagaagttgggtactagaacaatttactttttactaactctttctctccctgatgaaatgtaaagagaatgagacaattgtcaaagtaaccttttgtcgacaacgtctgatacaacatgactgaagtgaccttgaattttaattttgtttaaaatagagaactgtggctaggcactgtggctcacacctgtaatcctagcactttgggaggccaaggcaagcggatcacttgaggccaggagtttgagaccagcctggacaacatggtgaaacccaatctctactaaaaatacaaaaattagccaggcttagtggtgcgcatctataatcccagttacgcgggaggctgaggcacaagaatcacttgaacctgggaggcagaggttgcagtgagccaagatcacgccactgcactccagcctggatgacagagtgaggctctgtctcaaaaaaaagaatgtaagaacgtagtaaaataggccaggcatggtggctcacgcctgtaatcccagcactttgggaggctgaggcgggcggatcacctgaggtcaggagttcgagaccagcctgaccaacatggtgaaaccccatctctactaaaaatacacaaattagctgggcaaggtggcgggcgcctgtaatcccagctacttggaggcagaggcaggagaatcacttgaacccgggaggcagagggtgcagtaagctgagatggctccattgcactccagcctgggagacaagagtaaaactcttgtctcaaaaaaaaaaaaaaaaaaagaacctaatatcctaatgtaataaagtagagaaccgttgccacagcacccaccaaagtgtgtctctcattgacaagctcaggtacttgtttgtctgtttctcctgcctacccctcagccactctggatcttccctttgatcattcttttctctttctagctttgatgttttggtttccattctgtaattcgcacactattttgtggacatgctcttttcaaatttctctccaaaacaatagtacaaaggcagtcataaaccaattgttggtttttacaaaaaatcccatcatatcaccaaaaaccagttttatcataacaggatgaatatcagaccaatattcattattagagatgtagtctaaactgactcgggagaagacatccattgagtctttcattcagtgtaattagttgttatcatacatgcaaaatcctataactataaagcatttcagaaataaagtattgttaaacagctccaaatttattaaagtataaaaaatgtattgagtatataccatgtggcaccgtgcaaagtaacagagatgcctaaactaaaaggttatcctttgtccttattaaagtatgactgaaagctcgctggagaatatagtttctacatagagtcaaaacagtccttcgggctcacaaatttaatgatttatatggtataactggctttagatacaaatttacatgccagacaagcaatgtagaaaaatcaagaactaggaaacaggaaaacagatctacatttctgctttgctgcaattcattcatttttttcaaccattcatcaaatatttattgagagcccatgctgtgagagaaactgtattaggtgctggggaacatggtagcaaataagagagaccatgtatgtgagcatgagcaggtggcttaacctctccacatctctaacctcttttagactcaatgtctgaggtatctttcagacctgaaatgctaaggtttgcaacagccttgtggagggagaagctgccaagtcgccttgggacttgaggacttaccttcctttcaaaggattagcccttgttttgatttcaaaataattttgttacacagtttaaaaataatttggtcaggctctcatctacattggggtaatcttgacggtctggatgtggtaattcatgctcattagacttcaaaggtaggaagtcaaagttgggaaatggtggatgactttcatcaattcatagccaggcagcggttcccattgagcagctcctctgtggttccacccagccttccaaccaataacgcagcgtctcctgcaggaaactcatcgcttgggtcacctgttgctctttgctctaatgagccttgagaaaggattgctggtcatgggaccagaggctttatggggagggaagaactgttcttgactttcagtttttcgagcgggtttcaaggtaacaactttcttattatctagcttcataattgcagtaaggaatagctttttttgcttgcagctgagatgactttttcaagggagaaaaagggatttctataacgaagagagggagagagagatgaagagggagggagtaagggagagagggaagaagggagaaagagagagagatttgaatatacattgcttcaaggatgcaaaaaattacaacctggaaaaggcttcgagtaactttaggaaaatgagctgctggactcctcagtcaatctgtcctttctagtcaatgaaaaagacagggtttgaggttccttccgaaacggggccggctaatttagcccctcccacgagcccaagggtctgttatatctctgtttccttgaggacctctctcacggagacggaccacagcaagcagaggctgggggggggaaagacgaggaaagaggaggaaaacaaaagctgctacttatggaagatacaaagggtaagaccaaaattgatttgatctgaatccttaagaaaaaaaaaatagaaggaaaaataaaagcccagaccaaaaagcaagtacttgaaagctggaggcaaaaagccctgaatgaactttcccaccctcttccttctgagaggaggcagagaaagagctttgggaaactttttaggaagcagagtccagggttgcagtcaagggtggctctagagcaagctggaggggctcatgaatattcattatcaatttgtattcagagttggtttttttagaggcaaatgactttttcagtccccttgcagtttaagaggcagctgcctcatctgcagtccggactcatctagcctcgggtctgtacctcagggtgtttgcttgaagatgctgggctctgcgtgtagatttgttttgttctcgaatttcttgcatgctttcctgttgtgaaattagcaaaggcttctttgctgggaacaagacagagaagttaatgtggcacaaggctgtcacaacaggaccccagagtatgtctttcaaaatgctgaaagtttcttgagatatgtgggggagttttatgtgggggacagagtgggggacggggacgggtagagggaggaaatagaataattctatcttaaaagggcaggtcacatctgactacatttagattttgtctaaaaactacaagagcagcctggtttgcacagatggtgtgcagtctctatcttttacctcttttgggcattttctgccaagacggagagccagctgcttgccagcgtgtgagagccaggaagaatctctgcagcagtgagggagtatagggttgtaaacctccttctcctccttctttatcatctctaacttctaacattcccacatgcttataccgtatagaacatggaagaatagcatgagtagccaacatatttcttaatacttacaataatgatagctgttaatgttgactaagtctttattctgtgttgggagctatacctagcatattacatgtgctacttacttgtcacatgaaccttacaagtgctatcattgacattcccattttccagatggcataattgaggtactgagaggataacttgccttgagatctcatagttagtaagggctgagtgtggatggaggtggtctgaggcagggctggtgggcttttccactccccaatactgtttctctgctttttctggtgccctgacattgtggatttcaggtttgcaaatccttgaagctactggggaagtgatactggtaaaatcttaagtctgtgaaggaatttgtactttgcactcaagttcacatacattttcctcatttggtgctcatggccattctctatgagaagcaggtattgttattatggtcttttgcaaaaaggagaaactgaggtcagaaggggttagtttggtgacaccagtcacagctagttgtcaaaagtctggactggggggctggatgtggtggctcgcacctgtaatcccagcactttgggaggccgaggtgggcggatcacctgaggtcaggagttcgagaccggcctggccaacatgatgaaaccctgtctctactaaaaatacaaaaattagctgggtgtggtggtgtgcgcctgtagtcccagccacttggaaggctgaggtaggagaatcacctgaacccgggaggcagaggttgcagtgagctgaggttgcaccactgcactccagcctgggcgagagtgagacactgtctcaaaaaaaaaaaaaaaaaaaaaaaaaaaagatttggactggatctgaaaccctctgcttctggtttttcttccaacctacagagcagacccagtcatctctgaacgtctgtccccaccccaagctgcgcctcattgagttgctttcagttccccaaaggaactgcatctttcctcagactgaagctaggcactttcttctgttttaagggcctatctggtactctgcttcccctttagtctggagccgagctgcctgggtttgaatttcagctccaccatttactgtgtgccttagtttcatcatctgtaacatgaagagaataacagtaacatctatcttacagggttgtggtaaggactgaatgagggattcatgcaaagtttttagaacagggcctgatatatagtattgctaaataaatattaacatttgctatcactgcttgaagcctcatattgggtgttattcccctttaagccttctctaatccttcaagtctagattagcccccatcttggatgcttctatagtacctcatcagttatgcctaaggtggcactcatcatacttgtccatgctcctgccctctgcatcaccttctctcccttccaattatattttctgtattcacctttagatctgcagtgtctagtgcaattttatttttagtctctaaacttgtggcaactttctcatcagtgtgggcagagtggtgggagaggggcctcagtcatgataggggtacaggaggtagccacagaggatgaccatatagcagtcatagagggccagaagccacgcaggaagtggacatatgctgagtactgattcaggaagagcacatgtcattcagcaaccaatggttaaggtgtcaggtttcaatgaccttctccatgaggtctgtgaggtcctctgacgtacttattgtgggtcagcttcgcagccacattcatcagcccctgggacaggttcttgaatttggtgttcctctcagagaacatcccaagctttccttagaaggtggtacacaccaggctcttgtgcaagtccaaaaggtccttgtcagccattagcaccttgagttccctaatgggaactcaataaatatttagtaagtgaagtattattattttagctgatgctcatttgagaccttcaagaggcttgtttaaaaggggacctttgagtttgcagtagggttccccactggtacatatagatctttggcacaatctgtaaagacgtccctctatgtggatacactgaaaaacaaaatgcatccctctgggtggatgattttcagagctaatgtaaccccatgccagggcaccctgttgggcaagtgaagctctggctgaacttcagcccctactccctgctcagccaagggccaaactggagatttcagatgcctcatagccaactttgctttctctgaacagaacatctggttccataaatagtgtctttctagccctactttatagcaaccttgctgtctgagataatgtactctggtaatgaaataaaaacaaacactacagaagttggccctgggaaaaatcataaagtacgctatggttttttccagcaccctccctttcctcttcctggcataccttcaaaccattttgacaaatattattgtgtgtctaccatttgtaagttcccatgccacacagatccttggataaacagtttgctcacggtctagtggggaagcctaataataatagctgggaagtgctaataataatagctaacattgatcatttattatgtgccaaacattgtaatgtgtgttgtctcatgtaatctttacaaaaattccatgatattggtttctgcatcttccagctgtggaaggaggtcatttggttaaggccacacagctaataataggcagaggggaaattttgactgatgtggttaggctgcaaagtctgggatcctaatggatacgttctacctcctcaagagctgtaatgtaagtctaaacaaagtgccatgacacagtggtgcacgcttgtagttccagctactcaggaggttgaggcaggaggatagcttgggcccaggagtttgaggctgtaatgtgctatatttgcacctgtgaataaccactgcactccagcctgggcaacatgatgagactttgtctctaacaaaataaaaataaaaaataataatacaagagaaagtgccatgagaagcagaatagggagcgatggcttctggagaaacttctcaaaggataggacacttcagttggatctagaaagatgagtagaatctggtgcccatggcaagccccttcaccctcccagcagtgcttgaagatcttttctctcttttaccttaactatagtgtagatttaagagtaaaaagcccccttttttcccaagctctgagcagtcaacctacttacatgtccatcttggagatttgaaggcagaagtacagagtttatccttcactatgggtcgtgtaatcaaataagcctttacaaagcaatcagctgcacattaaatgatttccttaatcatgattgcactgcggggtaataacatacatctggtaaacagtttttataaatcattgtgattggtattgcctttacttggtcaaattgcattttgagagtgctttccctcttgtgttgtctttttggttgtttctccgctctttataactggtaatggtgctgaagggcactagtgtttaatcgcaccaactactgtccagaggtgatgggctccatctgtgtagagtgaaggtgaggcctggagtaaattacatagagtttattcttttttttttttttttttttttttttttttttttgagacggagtctcgctttgtcgcccaggctggagtgcagtggcgcgatctcagctcactgcaagctccgcctcccaggttcacgccattctcctgcctcagcctcccgagtagctgggactacaggcgcctgccactacacccggctaattttttgtaatttttagtagagacggggtttcactgtgttagccaggatggtctcgatctcctgacctcatgatccgcccgtctcggcctcccagagtgctgggattacaggcgtgagccaccgcgcccagccatagagtctattcttttaagtacttcggaggaaggccaaaatcaagggcagcccctgtggtgaagaatcactaaatgtcttgatggtttggtgaagtgtgcaagagtggagtcacttgtttgtcttggtgattttggtgtgtgtgtgcatatgttctgaagcagtgcttctcaaactttagcatgagtatgtatcattagagaacttgttaaaaatgcagattctgatccaatagctctgaagtaggtctacatttctaacaagttcccaggcgatgataatgctgcccctccacagaccacactttgactggcaatgtggcagggtcatcgcatgccttagtctcagggcttattttggtactaaatgaccaagctcttcccaccctctactccctcaccaagctgccacttctagtcactggtcaggtgtcattgcaggatgatgggaagcctaattcatttattcattcagcaaatatatgccctagaacaggaaattgaggctcccaatttgccaaatcctagaaactggaatcttcagcacacaaaaactactgttacacaaaaaggccttgtgttagatttcctgcatgtctccaccttttctccatggctccaagcttccctaaacttcccttattctctgccttcaacttgagaagtactggagcagaatgtgtggctgcctgcagaatcttgtgctgggtgttggagtcccagggagctagaggtagcagggactcagggctctgagactggcaacagtgtgcctgaggcattgtctacgctctgcagaagaaaggtgggaataattctaggagcaaagcaaggaaagtgggtgcagagagaaccgatggaatttctttaggcttgaaaacttgagggggttgtgaagagaaaataagttgttggagaaaaaaatccagagtagaggttgtctaacatgtatgaaacatgctgtttttgttagatcatcaaagtgactttagagaccgacagtggcagtacatgccctgttacacaaagaggtgtttccttccataaccactgcttggtttaaaaaaatttaaaaagaagcaaaaaaaaaaaaaaaaaagaagtgtttccttttgattcataggaaggatgtaaagcattgctttatgtccgtgaggatacaagtaacatagcacatgcccattaaagaaaacatgatactatagattacagtagggaagaaaaacaatcacttgtaatattttggtgccatttcctggcagttttttttttttttttttactatgcctgggttgtttctctcatttggcattcacttgaataggaccttgaaaagttatgagatggcaccatgatcattaggctatatatgcagttttaaagcctggttttactgtagcagtgaagcacatgtattttccattttatagcgtggtctttgttagcgtaatttttatagtcacatagtttatttaacagttctcctgttattgaatattgaggatgtttccatttccaataaatgtctttgtgcaggaagttttttccatatgtaggattgcactctgaggacaggatcccagaaatagacttactagattgaaacttgttaatgttttttaaagttcttgattactgttgccaggttgcattcccaaaggttgggcccttcatgctctcaaaagcagttcctgttttgtggcatccctgacagctttggtgtttttgtttttaaataattttatcaatttttagattgttttagtttgtatttcttaattacagtaaatttgacatttttcacgatatacttcttttgtatactttttacatccttttcctgtttattataatacttatttggatttgatgtttttaatcaacttatgtgcatgctttatcatataaaagtattcaagttttcctgccatacttataatagtttttctgtatttatttatttatttatttatttttgttatgacggggtttcaccatgttgcccaggctggtctcaaactcctggactcaagtgatctgcctgcctaggcctcccaaaatgctgggattacaggtgtgagccaccacacccggcctctgatagtttttctgaatctgttcttactgtgaatagatccaacacatttttatatgtggtgtcatcgttttctaaatagtttgacatcacatttttattctctgtagcccagaatattacttctaaaagattgtaaatgatttttatttttgtttgccattataattaatttttcattttttccatgatggttagagaatatggctttataatttctgaggtttccttgtaactaagcatatgatgggtttgtgtaaatctatgaacacttgtgaagaagctgtatgtttttaggatataaaattggatatttattaatcaatccagtcttttcaattatatggtaatttatctccaaccataatattctctgatgggtagagaggagcttagtcctaccaacaccttgatttcagtccagtgaaactgatttcagccttcagacttccagaactgtaagagaataaatgtgtcttgttttaaaccactgagttttttatggtaatttgttatagcaggcaaagaaaacgaatacggtaagtgtttaatgaaaggaagtgctggtggctttagttagttaacacacaggcttatagtggacattggttcgcacactattctaatcaccttacagatgttaattcagttctccaaccatccaaggaggttggtattatttactgttaaataactcaattgttaaagtctctcagttggtaagtgttgaagttgagattcaaatccatagttgttgatcttattatctggagacacaattcacatatcatacgattcaccaacttaaagtcgacaattcagtggttttagtatattcacaggattgtgtaccaccaccacaatcaattttggaacattttatcaccctgaaaagaaacctcatacctattaatgggcactccccatttcctccctacatggcccccaccgttctgagtcctaggaaaacaccaatctactttctgtccccacagttttgccaattctggacattcatttcatagcatatatcccattgaatgtatataccacattttattcatcagttgatgaatatttggattgtttttactttttgacattatgaataatgctgctgtgagcattcatggacaagtgttggtgtggacttgtttttaatttcttttggttatatacctaggagcaaaattgctgggtcacttgtatgtctatgtttaaccatttgatgaactgccagactgttttccaaagtagctggaccatttacatttccaccagcaatatatggtgattccaatttctccacatccttgccaacactttttattacctatcttttattatagccttcctaatgagtgtgaagtagtatctcattgaggttttgatttgtatttccctgatggctgatggttttgaaaatctattcatgtgtttagtgggcatttgtggatcttttttggaaaaatgcctgttcagatcctttgcccatttttttttttttttttttttgaggtggagttttgctcttgttgcccaggctggagtgtgatggcgtgattttggctcactgcaacctccacctcctgagttcaagcagttctcctgcctcagcctccggagtagctgggattacaggcatgtgccaccacacccggctaattttgtatttttagtagagacgggctttcaccatgttggccaggctggtctcgaactcctgacctcaggtgatccacctgcctcggcctcccaaagtgctgggattacaggcgtgagccaccacgcctggcctctttgcccattttttaaatgggtttacctttttatgattgagttgcaatgattccttatatattcccttttcagatatatgatttccaaaaattttctcccattctgtgggttgtcttttcactttcttgatagtgttgtttgcagcacaaaatttaaaagttttaaattttgatgatattcaatctatagtttctttggttcttatgcttttgttgtcctatctaagaaactattgcctaatccaaagtcatgaagatatacatctatattttcttcaaagagctacatagttttagcccttgcatttaggtttttaatccactttgagttagtttttgtatatgttatgaggtaggggccaaacttcatgtttttgtgtgtgaatatctagttgttccagcaccatttgttgaaaagattattattttctccagtgaattgttttggcaccctgttgaaaatcaatttcccataagtgtgagcgtttttttctagactctcagttatattccatttctttatatatctagccctatgtcaattccacatttcttgatactacagcttggtagtaagttttgaaatcaggcagtgtgagtcctccaatttcattttattttttaaatattgtttggggtattatgggtcccattaacttccatatgaattttaagatcaggttgtcaacttctgcaaggaagccagctgagattttgataagattgcatcaactgtaaatctatttagagaatattgccatcttaaaaatattaaatcttctaatccatgaacatatgatgtctttctgtgtatgtaggtcttacttaatttccttaagtaatattttgtagttttcagagtgtaacttttgtatttcttttgttaaatttgttcctaagtatgattttctttttgatgctattataaatataattgttttaaaatttcatttttggtttgttatcatagatttactttttttgttgttgtattaatttttttattttaaaatgacttcaaaattacagaaaagttacaagaacaattcaaagagcatttcacaagtattcaccaatttaaaaaattctgccacatttatcattctctcttcccttttatatctctcccacacacaacagtcacatatagtattgttcctgaaccatttgagaataagttgtatatattatgttcctttacccctaaatatttcagtatgtatttcctaagaacaaagattttctcttatataaccacagtacagtagtcaaactcaggaaatctaacactgatagaatactttcaattgtagtccataatcaaattttgttaattggtcaaacaattgttatcatagatttacttttaacctcaattacgctcaatactatattcctcataagttcttagattctctaacagtgcttcaaataataatgacttcatgctcttaatgcaattaagattcatttaattcaatacaattgtctgttgtctatttacctctactcatattttgtatgtttttgcagttcatattttgataaaatattgaaataactctttttatctacttttttagtcctaaattctgttcccccttctcatttggctgatatattttgtccatctttatttttaatctttctaaatccaatttgattctctgttttaataaaggaatgtaaacagttcacatttattttatctgccttttctcattttattctctttagtgtttaatgtttttttctgttatgctttttgctatacagactctggactttgttatttgtttttatatttccacaaagctgtgaataacggacatcttacttttaattgtacttgtagcaatcttttttttttttttgaggcagggtcttgctctgtcacctaggctggagtgcagtagcataatcatagctcaatgtaaccttgaactcctgggctcaggtgatcctcctgcctcagccttctgagtagctagggctacaggcgtgcaccaccatacccagctgattttttattttttgtagaaacagggtcttgttatgttgcccaggctgtggaaataaaagaaaagcattccatcctggctaacatggtgaaaccccatctctactaaaaatacaaaaaaaattagccgggcgtggtggtgggcgcctatagtcccagctactcgggaggctgaggcaggagaatggtgtgaacctgggaggcagagcttcagtgagccgagatcataccactgcactccagcctgggagacagagcgagactccatctcaaaaaaaaaaaaaaaaaaagaaagaaaaaaggaaagcaaaacattcctgagcttaaatttatcttaatatcaaagtgaaattagtaatttttgaccccattatgagagaaggattaagagtttttgtgtccctgtgtcctcctttttcttattttaaatatttaatttgataatattataaattcaaatagtaaaaattatgttagtcacttatttcacaggattttttctctttatttggatattaataatcaaattcatccatccatgaatttaatgaattttaatatagttcttatctcactatgcctttccccattcttgggaccctaatcttgattcctttcataatgatctagtaagcatattaatttttagaaaggggatcagtgttataaaagagagacaacttctcttaaatatagcaatctttccccctcaagtcattggaaatattcctccattgtcttgagaagtttgatgctgtaaagaagttgctatagtttgaatatgtccccccaaaagcatatgttcaaaacttaatccccagtataacaatgttgggaggcaagacctactggaggtgcttgggtcatgagggctccaccctgatgaatggatcaatgccaataataaaaggacttgaagctgtgagtttgttctcttgctcttatgctctcttgccctttgctttctgccatgggatgacacagcaagaaggcccttgccagatgctggccccttgatctggaacttcccagcctccagaactgtgagccaaataaacttctgttgtttataaatgactcagtctgttgtagcagcacaaaacagactcagaagttgaggacaactgttttttagcctgaatggtttttgttccccatttctgaaatttacaactttcacaataagataactgggtatagacttcctttcaaaaatttttgcctgggatatggtaaaccctcttgatttccaaatttaggacttatttaggagcaagaaagatttcttctgtcacaactttgattaatgctgctgttttgtttgtttgtttttttcttcttcagggacctatttggatctcttatctctaaattgcctgcctgtggcctgcctgcctgcctccttccctctttctttctctttccctctctttcttctttctttcttttcttttttctttctttctctctctctttctttctccttccttctttattcctttcattttcttcatttatttttcattgcattctgagactattttcctaagaatttcctctatatcactgattcaattttccttaactatctcccatataaactttcattcagttacagtgtttttggcttccatgaaatcttttattttagcttgtttatggcaacatcctcttgtacagagttcaaaaaaacaaacgatttccatctattcctgcttcatatctattttagaggcaagcttttccttcattgttctttctattttcttgcaaaatttatttaatctaaggccttatccttgaaagaaaagagattccttttgtatgtatgtatggatgaatgtgtttttcaccttatcctaaaaagtatttaaggatgtattaggggagatttatcccagtctaacgttgatatggatggaatgcatagtctgcccatggctcccttaggttctgttcaggtcttggaaaaatgcaatcaccaaatgctagatccccatctaagtatgagaagacatctaaatcctccaggcagaaaagttcactcagacccaggaaagaaggcaaaagtctcgccatgtacagtagtcatgttccagaagatagagtgactagggctgtcagagttctgtcaatatggttgtccagaggcataaaggcattcaggaaggagcctttgctccttccccactgagagcaaacctctgttgaattagggagtgagctcctgttccactgcttagcagttttcctcagcctttttttggatatcatttctaagatctctttagacttgtggtagcatatggctgctagtgtggctgtttctgtgaagaacattccacgcagaggaaccaacatgtacaaagtcctgaggagaaattaagtgtttaagaaacaacaaagaatccagtgtggttggagtggagaaagcaaggaggtgagagctgagaggtaggtttggcctaaatagaatgtctagcatcctgcaggccactgtatagcctttggcttttacttatagagcaatgggaaaccactgtgagtgttgagcacaggagtgactttatccaattcacgttttaataggatcactctggctgcattgtagagaacagacataaagggatataagcagagagactagtcgggagactactgcagtaatacaggtaaaagatgatggtgtccatttccaggtagtagcagtggacacggtgaaaagtgattggatttgggatctaatagagccaataaaatctcctagttggatttagatgggaaacaagagaggaggaaacttgactccaaggttttgggccttccaagaaactagaaggatggagttgccttgagatgagaagactgtaggaggaatagttttgagtgggaagatcaggatctcggttttgggtgtgttaatgttccgatgcctatttgacatgggtctttcaaatagagcagatggatatacaaatttggagtttggggaagaagactggacttgagatacaaatttaggtcatcagatggtgtttaaactgagtgagacaggatttaaatccaatgagactgggtaagtgagtgtaactagaaaaaaaaaaaaacgacaatgctctaaggactgagccggatgctccaactttaaaggttggggataggaagagaaaccgtccaagaagattgagagagagagagagagtgagtgagtgagtgtgtgtgtgtgtgtgtgtgtgtgtgttggagtgggggaaggaggataaactaggtaggtgagtatggtgtcctgggagccatcggagaaaagtgtttcaactgggtctaactgggtctaatgctgctcatgggtaaaataagatgaaactgagaattgaccctggcatttggcacagtgaatgttgaaagttgttagtaaagatttcacaggtagaggaagtcttttagggatggaaatatttacagagaggtgtgtaacttcctggtgctgatgtccatccagactgcagacattttctgtgaaagaaaagccagaggcctttcagggccaggaagtatggtctttttcaattgtgtttttctcaaaaagcttgctctaagattcacattgtgaagacagcccaaactccaggcccctacctactgttactcttcccagaactgccttatggcttcagagagcagatctgtttgcaaaactaatggaggattagggctggggaggagtagaagatcacatttcaaatgtggtgtaggtatctatgcatttggcattttaaaaagactcagtggattttagtgctagaagagacttaaatatcctcaaatctcttaattaaaatgaaatcaattgcatttgctgttttaattacaaaaataatacaagtttataacaaaatttaaaatatataaagaataaataagaaaataaaaatttgtgtaagtttactactcataactctgtcatatgactttttagtctttctcttgttccctctctttggcttactttttattgttttttagtatttattttctacaaatttggatccatgttatgcataccaattgtaatcctcaattttactttacagtttgtcgtgacaattgaatggcttttaccatatgatcttttaatggctgcatataatattccatcatttgaacatgtaccatatgtctatttaaccatttccttttgggaaacatttgagaaacttccagttactttccaaattatttttcaaaaacatttgcaagttattttccaaatatataattatattataacttctgtggattaatctcatttcacatctttgacagtttctttaggatcaattcctaaaagtagaatttccaaatttctttccaaatttcagcagtgtatgagtgatagaaacattgaagtcctgaggtgggaaggaatgtgctcatgttgcacaactggttggtggctgagtgtgcccagttcccttgcctttttgaaagagcccctctccttttcttcctaccatgctttctatagcatttcagcctccttttagtgatgtcccgtatgactccttggaccttgatgacatttaaccttttcctgaaaactcttggctcccacttatcccaaactagtcccccagtgtatctctgggcatgaactctgaacaattagagatgtcctttttcatgagagaagatgtacacttctcagatacattttctctttaggggtacaaatgttttcccattagtcaagaactgccacccattagatattccttcatgtatccgaaggcttcctggagttttcctgacttctttttagctttactgatcatatattttctctctaaaatcttactcactgtagtacagacatactttaaagttattgcaagttttgttccagaccgctacaaaggaagtaacgtgattaaaagagtagtatgaatttttggtttcccagtgcatataaaagttatgtttacactatactgtatctattaagtgtacaatagcattatgtttaaaaaaatgcaccttaattaaaaatactttattgctaaaaaaatgctaacagtcatctgaaccttcagtgagtggtactctttttgttggtggagagtcttgccttgatgtttatgttgctgacttatcaggagttggttgctgaaggttggagtggctgtggcaatttattaaaagaagacaacaatgatgtttaccacattgaatgactcttcctttcgtgacagatttctctgtagcatgtggtgctgtttgataacattttactaacagtagaacttctttcaaaattggagtcaatcctcctccagcactcctgctgtttcattgagcaagtttacataatattctaaatcctttgctgtcatttcaacaatgttcacagtatcttccccaagagtagattccatctcaagaaaccactttctctgttcatccataagaagcaactccacagctgttcaagtttcatcatgagattgcagccattcattcacatcttcaggctccactactaattctagttctcctgctgtttccatcacttctgtagtcactttctccactgaagtcttgagcccctccaagtcattcatgagggttggagtcaacttcttccaaactcctgttaatattggtattttgacctcctcccatgaatcatgaatgttcttaatggcacctagaatggtaatttttgtccagaaggctttcaatttactttgcccaggtccaacagaaaaatcattatgtatgatagctatagccttattaaatgtatttcttaaatgagacttgaaagtcaaaattactttgttttgtgttgctataaaggaataccagagacagggaaatttataaagaaagaaagtttatttggctcacaattctgatggcttgaaagctcaagattgggcatctggcgagggtttcaggctgcttccactcttggaggaaggtgaaggggagccagagtgtgcagagatcacatggtgggagaggaagcaaagtatagagaggccggtgctagcctctttttaacaaccgctctcatgggaacgaatagagtaagagttcactcacccccaaagaaggtcattgatctatgcatgagggatctgcccccatgaccaaacacctcccatttggccccacctctaacactggggataaaatttcagtatgaggcttggaggagacaaatatccaaaccgtagcactccttgatccatagactgcagaatggatgttgtattagcaggcatgaaaacatttatcttcttgtatatcttcatcagagctcttggatgactaggtgcattgtcaatggacagtaatattttggaaggaattttttttttctgagaagcagacatcaacagtgggcttaaaatattcagtaaaccttactgtaaacagatttatggtcatccagccttttttgttccatttatagagcacaggcagagcagatttaacataattcttaaaggccctaggattttcagaatggtcaattaataatggcttaaacttaaagtcactagcttcattatcctttaacaagagagtcatcctgtcctttgaagctttgaagccatccttttttatggctgcatagtattccgtggtgtatatgtgccacattttcttaatccggtctatcactgatgaacatttgggttggttccaagtctttgctattgtgaatagtgctgcaataaacatacatgtgcatgtgtctttacagtagcatgatttataatcctttgggtagatacccagtaatgggattgctgggtcaaatggtatttctagttctaggtccttgaggagttgccacactgtcttccacaatggttgaactagtttacactcccaccaacagtgtaaaagcgttcctatttctccacatcctctccagcgtctgttgtttcctgactttttaatgattgccattctaactggtgtgagatggtatctcattgtggttttgatttgcatttctctgatgaccagtgatgatgagcattttttaatgtgtctgttggctgcatagatgtcttcttttgagaagtgtctgttcatatcctttgcccacttttcgatggagttgtttttttcttgtaaatttgtttaagttctttgtagattctggatattagccctttgtcaaataggtagattgcaaaaattttctcccattctgtaggttgtctgttcactctgatggtagtttctttagctgtgcagaagctctttagtttaattagatcccatttgtctattttggcttttgttgccattgcttttggtgttttagtcatgaagtctttgcccatacctatgtcctgaatggcattgcctaggttttcttctagggttttcctggttttaggtctaacatttaagtctttaatccttcttgaattaatttttgtataaggtgtaaggaagggatccagtttcagctttctacatatgcctagccagttttcccaggaccatttattaaatagggaatcatttccccatttcttgtttttatcaggtttgtcaaagatcagatggttgtagatgtgtggtgttatttctgaggcctctgttgtgttccactggtctatctctctgttttggtaccagtaccatgctgttttggttactgtagccttgtagtatagtttgaagtcaggtagtgtgatgcttccagctttgttctttttgcttaggattgtcttggcaatgtgggctcttttttggttccataggaactttaaagtagttttttccaattctgtgaagaaagtcattggtagcttgatggagatggcattgaatctacaaattaccttgggcagtatggccattttcatgatattgattcttcctatccatgagcatggaatgttcttccatttgtttgtgtccttttttatttcgttgagcagtggtttgtagttctcctttaaggggtcctttacatcccttgtgagttggattcctaggtattttattctctttgaagcaattctgaatgggagttcactcatcatttggctttctgtttgttattggtgtataagaatgcttgtgattttcgcatattaattttgtatcctgagactttgctgaagttgcttatcagcttaaggagattttgggctgagacaatggggttttctaaatatacaatcaggtcatctgcaaacagggacaatttgacttcctcttttcctaattgaataccctttatttctttctcttgcctgattgccctggccagaacttccaacactatgttgaataggagtggtgagagagagggcatctctgtcttgtgccagttttcaaagggaatgcttccagtttttgcccattcagtatgatattggctgtgggtttgtcataaatagctcttattattttgagatatgttccatcaatacctagtttattgagaatttttagcatgaagggctgttgaattttgtcaaagaccttttctgcctctattgagataatcatgtggtttttgtctttggtatattctgttgatttgggtggagagttctgtagatgtctattaggtttgcttggtgcagagctgagttcaagtactggatatccttgttaaccttctgtctcattgatctgtctaatattgacagtggggtgttaaaatctcccattattattgtgtgggagtctaagtctctttgtaggtctctaaggactcgctttatgaatctgggtgctcctgtattgggtgcatatatatttaggatagttagctcttcttgttgaattgatccctttaccattatgtaatggccttctttgtctcttttgatctttgttggtttaaagtctgttttatcagagactaggattgcaacccctacttttttttgctttccatttgcttgttagatcttcctccatccatttattttgagcctatgtgcgttccttgcacatgagatgggtctcctgaatacagcagactgatgggtcttgactatatccaatttgccagtctgtgtcttttaattggagcatttagcccatttacatttaaggttcatattgttatgtgtgaatttgatcctgtcattatgatgttagctggttattttacccattagtttatgcagtttcttcctagcatcgacagtctttacgatttggcatgtttttgcagtggttgctaccggttgttcctttccatgtttagtgcttccttcaggagctcttgtaaggcaggcctggtggtgacaaaatctctcagcatttgcttgtctgtaaaggattttatttctccttcacttatgaagcttagtttggctggatatgaaattatgggttgaaaattcttttctttaagaatgttgaatattggcccccactctcttctggcttgtagagtttctgccgagagatccactgtgagtctgatgggcttccctttgtgggtaacccgacctttctctctggttgcccttaacattttttccttcaccttggtgaatctgacaattatgtgtcttggggttgctcttctcaaggagtatctttatggtgttctctgtgtttccggaatttgaatattggcctgccttgctaggttgaggaagttctcgtggataacatcctgaagagtgttttccaacttggtcctattctccccatcacttttaggtacaccaatcaaatgtagatttggtcttttcacatagtcccatatttcttggaggctttgttcatttctttttactcttttttctctaaatttctcttctcacttcatttcattcatttgatcttccatcactgataccctttcttccatttgatcgaattggctaatgaagcttgtgcatgggtcacatagttctcatgccatggttttcagcttggtcatttaaggtgttctctacactgtttattctagttagccatttatctaatcgtttttcaaggtttttagcttccttgcgatgggttcgaacatcctcctttagcttggaggaatttgtcattaccaaccttctgaagcctacttctgtcagctcgtcaaagtcattctccatccagctttgtttctttgctggcgaggagctgtgatcctttggaggaaaagaggccctctggtttttagaattttctgcttttctgctctggtttctccccatctttgtggttttaatctacctttggtctttgatgttggtgacctacagatggggttttagtgtggatgtcctttttgttgatgttgatgctattcctttctgtttgttagttttccttctaacagtcaggtcccttaactgcaggtctgttggagtttgctggaggtccactccagaccctgtttttctgggtatcaccagcagaggctgcagaacagcaaatattgcagaacagcaaatattgctgcctgatccttcctctggaagcttcgtcctagaggggtgcccgcctgtatgaagagtcagctggcccctactgggaggtgtctcccagttaggctacatgggggtcagagacccacttgagtaggcagtctgtctgttctctgagctcaaacaccatgctgggagaaccactgctctcttcagagctgttagacagggacgtttacatctgcagaagttgtctgctgccttttgttcagctatgccctgcccccagaggtggagactacagaggcagtaggccttgctgagctgcggtgggctctgcccagttcgatcttccaggacactttgtttacctactcaaacctcggcaatggcggatgcccctccgcctgcctcgcaggttgatctcagactgctgcactagaagtgagcaaggctttgtgggcatgggatccgctgaaccatgtgtgggatataatctcctggtgtgccatttgctgaaactgttggaaaagcacagtattagggcaggagtgtcctgtttttccaggtaccatctgtcatggcttcccttggctaggaaagggaaatcccctgatcccttgcgctttccaggtgaggtgatgtcccgccctgcttcagctcgtcctccatgggctgcacccactgtccaaccagtcccaatgagatgaaccaggtacctcagttggaaatgcaaaaatcacctgtcttctttgtcagtcatgctgggagctgcagactggagctgttcccattcagccatcttggaaccaagatgtttctaatgacagacagggaaaagaaaactgacaagacccaggcagttgacttgactcttgttagagctcaacaggtggtttgtagttgaggaagtgtcaatggctaaaagatatgagaaaatatccaacttcactggtaggcaaacaaagtaaactaaaacagtgaggtactatttttcacatacctaaaagatttttttcttaatatccagtgttgttgaaaatgtggggaaactaatattccctaactgttggctagaatgcaatggataaaatttgacattttgctctactttttaggatatgtcctcaaccttatcttttaacctttttgttaaaatttcttattttggttattactgtttaaatttctaaaatcttgtttttattttctgatagtttatttaaataaaattgtacacttttttggtatcatggatgcaatattttctcctctctctgatgatagtaattaatgttttcttctttgtttcctctgtttttttaactgtgtttttaacttttcatttatgtctttcatgttgaagaccttttcacatattatcttacttaatcttcactcagttctatcaggttaatattattatccttgttttatagttaatgagtcttagagagtgtatcattgttttatttctcttaccatgggcagctgaaaaaattgttggtcatagaccaaaagtactggtcacagaccagccaaatccacagtccagcttcttaatctagctggattctctgttgaatccttaaaatctctcctcaccacctccctaaccccaacacttgtctcattatattagacaactttgttagaattttttccaagttgaattaaagtctttctccttccctttacctttccactgtcattagaactagttctgccctgtagaccatagagatcctctcccatttctacatctccttccataggagatagtccctcaaatatttgaaatgatactgtcatgattcctccacatctgccattccccagcctgaagaggcctggttctgcctactttattctgcacctttgtgaaattctgcttggctaacatttttggaacgctttggaccatgttctctcaaagtctcactttaagtgtgtgtctataacttaacatagggtccagatatgctctgaaagacttaacctcaaatgggatactgtcattttattaatgtatgctggagttggcttagtttcaatttgaggaatttcatgtgctgcaacttcttttcctagaaagtaatacttttgatgtttctcacaaattataatttctaggactctgagctgcctacttctacttactcctttttagttagggttgtgtgtgtgtgttgtccttactggttactgcttttacctcctagggtctttttttcaaggccattttcacttaaccttagctattaagcccaagtggaggtgctaaggtgatttgaaaaatggaaatatcttaatttaaattgcacaaacaaacactatcgtgcatatttgagaagtaaaatacaatgtaaatgggggcttttcaggcaccatgttaagcacttggtatatattatttcatttggcttttataacagcattatgaggtgagaactgctgttattctcaatttagatgtgaggaggtgtggctagttcgatacaactaggagggccagaggtgtattgcagacctaaacataccagactcaagactaatactgctgttacccacagaaatgaagctcacatattgtattttatgccaattatagctgatgttgttggaaggaattatataatctgctgaggtgtattgcatacttctcatctttaacagaacataccaaacataaaaacttttatttgataggttgaggtgatgatattgaacatctgtcctcccatgttcattgtagcactattcacaatagctaagatttggaagcaacctaagtgtccgtcaaacattaatttttgtggccctttaagtaagaataaatatgtggccctataaatatgaatcttatgtatatttgtatagacagtgccaagcatattgtaggcaactatgattcaaatcactgcacacatgcgtattgaatgagtacatgaatgaatcaatgaagttataaaacagcaatgacctcaaggtctattaaagtttttagaactatttgccactacactaaatcttttataaactgttttgctttatgagtctatgtgtctgctttttgtaatttttttcccttctccctgtcattgtaaatagaatatctatggacatgaaatgtgcctgaagttctttgcaaatggaagactaaaaggaagttgccccaggcaattcagatcattgtgtccaagagaggaacaaactcatgtttgatccaggtcatgactgtattcaagggctttgatcctaggtgtggggtccagctgtaggggcatcagggaagtacattcttggtctgtgtccaagtccttggtcagggaagtctgtcttagcaccatggagacaggggaaactgaattcagaccttatgtgacaggagtggactaaaaccagtgcatgcatatgatccagcaattccatggctaggtatacacccaaaagaaagaaaatctgtatatagaagagatatctgccctcccatgttcgttgcagcattattcacaatagctaagatttggaagcaacctaagtgtccatcgacagatgaatggataaaatgtggtacatatacacaatggactgctattcagccataaacataataaaatcctgttatttgcaataacatggatagaactggaagtcattatgttaagtgaaataagtcaggcacagaaagacaaacttcacttgttctcactgatttgtgggagctaaaaattaaaataattgaactgagagagagtagaaggatggttactagaggctgggaagggtagtgggggctgggtagaatggaaaaagggatgggtagtgagtacaaaaaatagttagaaagaatgaataagacctagtatttgatagcgcaacagggtgctatcaaacctattgccttggtttgcaatagggtgactatagacaataataatttaattgaacatttaaaaataactaaaagagtataattggattgtaacacaaaagataaatgcttgaggtgatggatacctcatttatcctgatgtgattattacgcattgcatgcctgtaacaaaatatctcaagtaccccataaatatagatacctactgtgtacccataaaaattaaaaataaaaaaataaaaataaaatcagcatagggagccagtctcctactaatttggtcaacagtttatgtcaggttgtagtcttaagggtggaaacgaaaagagggccaggaccttggtagccagaccaaagttcacgactgtgttatatactctgaaatggatttagccaaggaggtttgcccagattctcccataggtgatgttaaattccttccaggacacttgaccccaggcatgggattgatggtgggttttcaggtgctctcccactaaagcaaaaatgtccataatatattccaggaattaggtgagacagagcctcaggaaacaagcctgttatgccttcaccaaggcagggcagagctggataagggtgaacagaaagggacaaattattgatgagagttctgtgagtagaaactcctttctcttctttagaatttctgcctccagtttgttaatgccacttccaaaatacactgctctgagctgaagataatactgcatgcagatagagtgccatgaaggcattggtttgcagtgatctataaaggactaatgtgccaggctctgtgttaagtgcttgactttcaccaccttgtttacccctacaacaacaatttttaaattgccctattaagatatagagcattctatcattctaaaatgtttcctgtgattcagtatatatttatttactttttggttgatttattgagtgaagaactgaaaatcactttatgggtagtatatttccttttttgtatcacatctgaagtgagacattgtcaaactgggtaggtatgtccagaatgaggaaggatgcagagactatgtcatataaggaacatgtgtcaaaggaggtagtaaaaatgaatatgactggggctagtagttccaagaaaaaattggaaacatgctcctggctaatcagaaggtttagctaaaatattttcagagcctatcacgtgaacctggtaaaaacaacccagtattgggcaaaagagttagggcaatttgaggaagtcctggcgcctaggctaggtggtgatgaacagggaagatgtgaaggaaaaaggaagagagaattttcccccttgccttattgatttcatcctgcattagttcatctcagctcttcctgttgttcccccaaccccaacagtttttctattcttttatctatttttgaattgattctctaaaagttctaaggctgcgttttcagctcctggtcatctggataactactggtttcaggattcttggggataatgggatggaggcatgggaggagaatgtctgggttaaaaagatactgagctagaagtagaaggcttggttgaattttacactcagcaacatacaggttgggcaagttgctttgctctttagcttcagcttttgcacacctataaaatggaagcggtgtgtgtgtgtgtttgtgtgtgtgtgtgtagtgtatgtatccgttgtctcctagggagtttctttgaggatcaaaaaagagagtggacaaaaatgaattttgtaaactgtttttgagagcatctaaatgtagttttatgagtagcattgttaccattgtcgctgttctatttgctgaatcttgtttaatttggaagctccctaattcacagtgatttgtatagtggggtcatcactctgtaggagctctaaatggagactttgtccatgatttccaaaaggtcatccaccccagagtcacatgagactggaaagcaaatctttttcattaattggcttcaagtactttcagcttcaaatggaggtctctaagggtccttggctggcacatcaagggggcatttcaaagaaagtggcaaaatcttgactaaacttcagagcaaacacgcactcttttctttgctactctctttctaaaaagaaaaacaaattatactggtctgggttgtgtgagcatgtgtgtatcagcttgttctaattctcttttcccaaccccttctttgcttgtcccattttcaagataggataacacccaggtttttatattaccttctgtgttaggactttcttaggattcctaaaaattttggctaagtagcattaggcctgctctatttcacaggtaggcataaaaaaaaaaaaaacagtgtccacttcttcaagacagtatccaattcttcctggcattttgatggtaggaaaaatatttgaatttatttttagggcaagtcacgtggcaaaaagaataacaagtatttatggttgcctggggaactcagcttctagttactactgattatgggaaagaggaacaaattttaagatgaggcaaaattggtgaccaagaactagaatagcaggtggcctgggaagaggtgggggtgaaagcgggtagaaaatctatgcaaaaatataggttcctagtcattttttttcttttgtctctttcgattactatatcctgccttcctgcaggaggaatgtagtaagatgctttgtataatcaggtgctttgcttgttcttttttttttttttttgattgtagaaaagatcagtgtagcaatttgaccatttgccaaattacccataagatagggtaggcattaaaaacccagggacactgaagtcaggaaatccagcttcttgtatcctggatctttcttggaacagcctgtcacatatgacatctaatgatgtagcaccagctgctcacaaatacaagttccttagagtatatagacattatggggccactaaaaatgtcttatatggcttgctgccagcattttcagcactgtctctcaccagcagccactctctaactgtttgccctagccaagctcagagacatggggactcctatgagctccattgtcttgtgtagagaatggggctaactgtagagtgtgaaggcctggggagaaaaactcaggctgtgtttcctagtcaccccaagaccttgtggacccaggaagtagcagttccagagaccaattgctatatggctttctgcatgcccactgcctttgtcttgctgttgtcgcaggaaacatctggtgtacatccagtgcacccagagccttttggaaaacacctatcggcctcagtactcttttccctcaggctggcagacaatgaggaaggaggagagagagctacccattggaggaggaagtaaagctggaggctggggtagtggcaagatatgagcattcaggtctacaaagcttcaagtctctcattacttcactccatcaggccaggacaatcatgggggtttggcaggagtggcgttgcagggagtttaggcctaagggagtgtatgtgtgaggcacaaagtaataaggactggactttgttacctgaggtgatgagggtgacaggcccacatggataaattaggaaacaggcaacaggttctatagctgcatatcagagactcacagagtggaaatcactttgatgagggcagagcagcagcccaaatgaccggatacccactgtggaagtcatcccctcatcactttttcattcccaagactcagctcttctctgactctgttactttgttggcaactcccgttgcagtgtctgggcaatttctctcagttgttacaacttgcattcaagggcatctcttgttccaggccaactctattgatctctgaaaaaatgggaggtagaacagtgttcaagcattcagataaacctaccttccaatcatagttctgcttcttactagctgtcccaccttaggcaggtaagttaacttatctgaatgtcagttttcccgcttgtaaaatgcagttggtattagtacttaatttaaagctttgttatgaggattaaatgagataatgcaagtccagcctatagttgactttggcttaagcagcagttgttggaacaatctgttgtggccaagatcataaggtctcaggacacaaggttggccacaaaaccaacccagcaacttatgaagcagaaaccatctgtggtaacttttctcagaaggtggctatgtaaactggcctcatttggctgaaggaagttgggaggtggataggtgggggaaataaaagaaaagagaagagttaaatgagtgtcaatgtctcctaataattaaaagcttagaatccctggagtcagacaggcttgtcctcaaattccagctctgtgcttaccatttgtgtgaccacgaatatgttatcaaacttttggaccccagttttctcaagtgcaaaataggctaatgatatctatggtgttgtgataatttgatgaacaatgagtataaagtgcttagcacagtgcctgctacccagtaagaacataacaaatggggaagaggatgattgtgaggatggcaagcgtttttcttggcctagcatccagtggtgctgctcttgttatctaaggaggcaggaaggagacaagagtgggcacttggtaaaactggatgcaggtgaaagagaggtgtttatctgagggcctcatatctgagcctcacttctacctcctgaccccttatgtcctcccaccctgctacccagtgcttgggtgctgcttaaagcactttgttccaaactccctagggatggtttgcccctccccttcccataatgactcaaaacttctgttcattctgttcagctttgccacagccaggttttggtgagaaggaccacacagcttcctttgactttaaggccaccagaggtatttctttttaactccaccaaattggaaattagtggagcaataagcaatggaggatggagggtactttgagcacagagacttccatattgccctgaaaaggagcctgaaagacaaggttgaaggagacgcaggttcagtaggggagggagaaggaatgcatatccctagcttccgtattgcactaccgtcctttgcctgagaaagcgaaccctggtgttagaatctgagactaatgttgttccccaaggaggaaggcagctcaggactggttcccaccaagccaagtgcagtcctagattctggctccctgtgcccactgtcagcagagaaagcaccaaatctagtgagaaaaagtttcagcatatcttaaaatgacagaaaccaccttatccaacctagacttttctgccatgggaaaaagatgaaacctggaaatctgggaaacttaaaattttcaacaccatttataaatataaaaagcctctggttacttgagtgttgcacatttagatatttgattttgtatgttgattacaaatggagttgtggccttgcaaaccatcacaatcatcattataatcattgaatttatggttcatatggcagtttcttatacattattcaatttactttaatcctcttaactctgtcaagtaggtattaccattaatcctcattttacagctgaggaaacaaggtagaaaaggtgacttactcaagatcccagagctagtaacctcgaggttttgttttgctctttggttttgttttcaatttaggtaatgagctaccaacattagaatgatgcatagaaaggtgctgggccatggtctttgcatcttccaataaagcataataagatatattaatttccaggaaaagagttgagggagaaaaaagggggaatatgatttattgatacaacttttagggaaatttgatcagcgtagtattccaagctttattttgatcattttcaaaccaaagtttaatctgttaaaatagacatgcttcttttactctgtgtaaacatgaagctccacatattacaagagggcttggaaggatgggcctactaattggtacagagcaacaaagtctattttttatttaaagatataggtgttttaggaaggagaggggatgttaaagatagtatttggctgtatgaaaatatagaagtatgagactggcagctctgtagagggctttgggtgagagaatacaaaggagagaaaatgagaaagacattgttgtatgaatataagataaaccaccccagttaagtgcaggctctggatgaagtatttctattacaaatgacagagctgggacagaagcaatgtagactgttgatgcagtatctcgaggggagtttgcacactggatatgtaaattattattgtttaaagatattcttccatcttggggaagttgcttaacctatattatttgcatttttcttatttgcaaaatgggactaaaacagtacagttcttaccatatgtaatctttgagagtattaacaaaaaaaagtatgtgaagtgcctactacagtgcttgtcataaagaaggctgcagtggatatggcaacactttcctccatcaacccccacccccaaattcctttcagttatgaaaattctgaaacactgtaactttacctatatatttattggatatctacttttcgaaaagtagaacatgtgaagaattcttgatttttccttggagatacctttgcaagttagaggaagatattagtgcctgtcttccttggtttaattttaattcaaaagaaagatatgattgagaaggtaggagaaatgactgactagttcatctaggcattaatagtcctaaaagagggaactgtaaggcaaccagacacatggcctcaattttttaagaaggcagatttaaaaataaatacatgcataaataaaattttaaaacaaaaccagaaaaaatggtagacgaattctcatgatcaaatttactaaaaagaatatggctttaaaagatgagtctaggccaggcatagtggctcacgcctgtaatcccagcactttgggaggctgagttggggaatcatttgaggtcaggagttcgagaccagcctggccaacatggtgaaaccccatctctactaaaaatacaaacattagctgggcgtggtggtgggtgcctgtaatcccagatacgttggaggctgaggcaggagaatcacttgaacatgggaggtggaggttgcagtgagctgagattgcaccactgcactgcagcctgggcgacaaagtgagactctgtccaaaaaaaaagaaaaaaaagaaaaaagcgagtctaaaaaagaaataactaaatgagaaacctgattatacaataataaataatcataatggatgagaaaagcgaaaagcagttaaaacacttatttgatctgaggaactttacgaggaggcgagaaagtatgggtgagtttaattttcttatatattattttctctattttctaaaaatctctatggtaactatggcttttataaaataaacagttttcccccgaggatttgtacaatagagaaatggatgcaagtaattgagaagaatggttagaagctaggagaattcttttaaaagtagcatcacttggactaaatatctgttggcgatgaggcatggaggaaaaaatgctaaagataacaaaagttattttggttacagttcagtggaagaacatgaacaggaagaggaatgcatagtgatcatggatgatgcaaaggaattggaacctctgaacttctattttgcttccatctagaaaaatggagttcaatcagtacaaagtaaaacatacacaattaagaagtaattgaaatggatgagaatttattgagagcccttgacttttctaaatgagtttaaagaattttagagagatatgctctttaaattattggaattggtaatctaaatagtaaaagatgaaagagaatggatccaggaaactcagtatgagttgatacgtggcaaagtcttaaatatggaagatttgttaacacctaaaaaagaaagctccagtcacttgaaactggcatgcatttattgaatcaacttatatcaaattactcttatttgtaaaatatttagaagggctctagggttaaaaaattttggcagtctctcaaattcatagaaacagtgtacatttgacccttgcacaacacaggtttgaattatatgggtccactttgcaacaattggaaaaactcaaagatgaaccatatagcctagaaatactgaaaaaaattaggtaaaaggtatgtcatgaatgcataaaatatatgtagatattaatctatcattactaccatgaaatatacacaaatctattataaaaagttaacatttatcaaagcttacacaattacagaccatgcatgacaccacttacagttgatagaaatttaaacaaatataaagatgcagtattaagtcataactgcataaaattaactgcattacatactatactactgtaataattttgtagccacctcctcttgctattacagtgagctcaggtgttgcatgtatctgcctagaatgccataaattgcatattgcagtaaaaagtgatctctaatggttctcaagtattttgagtatttttcattgtgtttagtacaacactgtaaactttgaataacaacatgggacccattcaaagtaccacgagtgatattggaagtgctctcaagaagcagagaaaagtcatgactcatgacattacaagaaaaagttgaattgcttcatatgaactgtaggttgatgtctgcagcggtggttgcccaccacttcagatagatgattcatctcatagatggggatcttgcaaacttaccatatcgataaatacagtacagggttataaatgtattttcacttctttttgattttcttaataacattttcttttatgtagcttactttattgtaagaatacaccatataatacatgtaaaatagaaaatatgtgtaaattgactatgtgtgttattggtcaacagactattagttaagtttttggggagtcaaaagttacatgcagattttcaactccgtggaggtcagtacccccaacttccatgttgttcaagggctaactgaagtttatttcatcaagagtttaaaatgttttttagttgtagaaaatttcaaacaaatacaagatgaagagagtaatataataaaccactgtatacttattacccatcattacaaactatcaatattctgagttttttttgtttcatctatcactttcctcccaaccatacctttttgctgtttttggaatattttaagcaaatctcaaatattatatcattttacttgtaagtacttcagtatgaaaaaaatgtatagcagagtctttcatgatatgcccaaagatgagttggagaaatagagattggataagaatgaactaaaaggattggtactaacataaaccatggccaaatcatgttgataaatagtttgaaatctaccttgaagaaaggtggtagggaaatatactacaagattctgtccttgttgttgtcttatgtggcacgatttatcaatgatatggccaaaaatttagaaagcatgcttagcagatttgctaacaatacgtagcttttagtgagactgcaatgtattacataaaaggatcaagtatcatcaggctggaaaaatgagctgaaaccataggttgacatttaattgatacacacaaggtgagattcctgacttggaggtagttcatgggaagatctgtaggttttactagacccgtagccctcagtatgagtatctaaaatgatgagtcatatttaaacagtgttaatgtttagtttccaggtgaagggctataataacttcactgtatctgctatattcagttcagagcaatgtattttgagaaggacattacaaactgaagggcatctagtggagggtaattagggtgacataaaatctgaaaatcgtgatatgtaaagaatggtaaatggaactggagctatttagcctggagaataggggacttgaggatggggtttatatactggcaacccatgaggacttgaaaaacaaatttttaatgaagtaaacaaattctaatttgctttgtagcttcgagctgggatcagagagtggaagttagaatgaaacagaacttaggtcaagatagattgctaacagttagacatgtctggcaatggcttagactacctggatatgcacttctgtcccatcagtggagaattttactgcagagggtaaatacccatcttttaaacaggattaccacttggaaggagttggactaagttagaggttcacaagggagaactttggctgtacattagaatcacccggctgggggtggaggtgttaaaagtgaacagtgcctgggccccatgctagaaattctgatgtaattgtcccaggtgagactacagaaagtccccagggaactctggagtgtgtgaactctaaggatcctttcaactttgagatttttttttggtttgaaaaagagaaatcatgttcatggggggtattttagaagtcagcatggtggaaaacctgaagatgacagtgaagtcaggcacaaaactgaactcaggggagtaaagagaattgcttaagagagactaaaagtgccagagtttaccaggagacagagaagcttagaggagagggtgccttgcatagttaaaaaaaaacatcaaaagaagtgagagtgggaatggtattaggagaagagagcgtggctgaagaagatgggagtgtccatcagacaacccaccctgctttgcctgggactgagaggtttcttgggatacagcactttcagtgttaaaaccaggacaatcccaggcaaactgggatggttggtcacccgagtgccccataagaccctgtcaaaagacaaaattacaacaaatttagtttaaagatctcaataggctttattgcaattttagaattaggcaacacttcattccataaaacagagtaagtgttccaatgagttgaccagaggcagcaggctttctagacagagaaagggctgaagaaagcagaaacaaagaacaaaaagtagattggacatttcaaagttactttcattgtgggcatagggagatagaaagatggaaagataactgattggttaacatcgggttactctgttgtaagaattaaaacagagggaactgcatgattgccagttgaagactgaaactggcctgttgggaaattaggctgttgcctctctctcctgatttcatggaagaccagataacaaactcaaggtttggagaagcagaaccttagataagggactctattttggtttttaggctggtctgttggggcctagtgcaggggtttagtccaaaacagtggcctcctataatttttgttgaacacccataaatgaaggcagcacgggaaagcatttgttatcctagtcactcttcctgcagagtaaagatgtgctctgcattcatctgaattcatggctttggtgtgcgtaactgcaaaagctgaaatgtcatgttcactctggccacgtattccactcatagtaccatacttgtgtgtccagcatcttgccagggtgctggtcttgggcttactatgctttctttggggtgccttgggattccttacgtcattgcttcctcccaacaccagctgaaacctcctgaagtgattttgaagcttgtttctttgaatagcttcttagcaatttcctcactgctatttcagttcccctcccaccattgtgtgaaacagtgccaaagaatttcattaaactggctgacttcaaggatggtgaactaggactgcttctaaaaagcaggctgatagtaactgagggaattgcctaataaggaatagacgggaggcatgctgcccctacataatctcttccttataaagagagaagtatggatgggatatgttgagttgtttataaaaaataatgaagggaaaatccccctaaaattatggggaaaaggcccctggttgggctttaagtatagagaataacttgggtagtcttcacccactgtatccctaaaaggcctcacaattgctcttcagtctctttctccccttctcatccgccattaattaggaggttacttatgtgtgttatgaattaaagcagtggttctcaaagtgtagtccctggacctgcagcagagcatcacctagcaacttgttagaaatgcatatgccctggcctcacctcagacttactgaatcagaaactctgaggatggggtcaagcagttgtaataagccttccaggtgattctgatgcaggtttatggttaagaattggattagagaaactatgtttttagaaggttctttaaaggagaagtccagggcctaccctctgacatggggctgaacaggaaagcagcaagcagaagaaaccagaactaaccactgagccacggtgggtggtggtttgacatttatgtgacaagacagttaatgtgacaggaaagaaaaatgaacagagaattgtgaaatcaaataggatcagaatgatgtcacagtggtcaatccaattaattcatatcattacaaaattagaaagtcactaatgactaatttctaatatatatctgcataaaagggcattgtatgatatgaattggatttttaagtatacagtattttgtttcattttggagacatagcttttagtaaaaacatgtccaataggttctagtcaatccttaattgaagctctatgttgacaggaaaatagaaactcattgaattttaaaaagatgatttggctactacagttttattattattattttttagagttctgtagcaaagaatcacagaggccaaaaatgtgaaaaaaaaagtcatatggcttaatgatctttgtaatcataaccctatcaaccataacaaaaacaacaatcataagtacagttgccatttatcgagtgcctactctgtgcagacactgctgagtgctcagcacgggggatgaagtcatggataagcagcagacatggtccttgccctcctacccagtgattcccaaccctggctgcacttggcaccagggagccattaaaaaatgtcagtgccaggaccccagcccccgagggattctgatttaattgctttgagatgggaccccagagttggcatttttacaaaggtctccagtgaacctaatgtatatatccggaattgaggactgctctggtgaaagacttacatatgtaaacaattcattataatagccttaagtgctatgaagaaaaagctcagagtgttgtgaagggtaccagttagtgtggggttcagggtagggttttctgaggcatccttgaggaagtgactttctgttgggatctgaagggtaaataggaaatagctaagcaaagaggatgggaagggaatgttctaggcagagtacataaattgtgctagggctctgggcgaggacagcatagtgaaatgggggctgaaagggggcaaacagtgaaggaaatactgtgattagagaagtggagacccagggaggggccagaacatacaggacatacgggctagataaaggattgtgttctttcttgtaagtaatgggaagctgtggagtattctaagtaactagtggatgatgtgattatatagaccctttgagaagattactctggccgtagttggaaagcagattgatgataggtaagagtggatgcagaggaatcagttaggagtcttctgtgggagggcatgatgatgggactaagaagacattagagtgatggagagggttacatggcattgaatttttgggagattccaagacttggtacaaggcctcagggacatttgctgagttagtgagttgcttggatataaagggtgagggtggggaaggaatacaggatgatgctgctgttcttggtgtcagtaactggatgagtggtgatgttcactgagctgtgaatattgagttatagaaagctacaggagaaacagttttgcagaggaaaggagagcatgaattctgtttgggcacaataggtttaaggtgcctgtgagatatccaagttaaaaggtgaaggaggcagctgaaagttcaataatacatatgtctggaccaaatatatagtatttcccacgtatggacagtaactaagaccatggggtccggtgagatcactctaatcattttttcatacagagctcactgcgtcttcatgtcaacttacctaaataagttacgtctttaaaattttatctagaacatgaaaatttagacaggttaaataacttccccaggtcatgcagctagtaagaggcagggttgagatcccatttcataggagatgcatcagtacctagtcatactgcatttccttaatcagaatgactgattctcagatacaatggagagttaaccatgtttgctaaggaacgaccaatgaccagctgagtgtatattttcttccattataaacatggcatttgagtctactattcttggaaagtcagtgaaaaaatatcccatggagtttatgattaagctctgagatccagattttgggtttactgcccaaacatctgtccccttgcttcctagaaaacatggaaactgaagttgaggttgcctggaagcttactaaaaatagtgagaaccatggaattgagaagttaaaacatgtttgaagtagtcaaatatatacctccacttttttgatggaaaacgttgtgtactaaaagtctaaatccatttcactcattcaactgacatatgtaacactgctataggccaaaccctttgctgggctctggagaggcactccttgttcttaaggtgctctgtctcataggggagactgacacaagttaaaggctattatagcattgtgagaagggtgctatgagaggattgcaaaggagggtatttcgtccatcattagagaaggggaaagcctttctcagaaagacttcctggaagtgataacacataaactaacaatttgagcctcaatttcttcataaggtagagttagttagataaataagagaggaaagaatactgtttcaggtacaagaaagaaacaggaacattttactataaggcaggaggataggaaaaaaagaccccatttagagaccaacaccttaatacacatgggttgtgtggttagatggttagcatggccttaaaattgttgctggagtttggcttttgagggacataaaggcataactgaagaacttcatactagttagggccacatactgaggtttgcatttttaggatgactatgttagcttttaagtagatgatgtgttggaaggggaagtacctagaggtggggaggactctacagaagttattgtaggagtccagggaagaaatacagagagaaatggcctgggcatggtggctcatactggtaatcccaattatttgggaggctatggaaggagggtcacttgaggccaggagtttgagaccagcctgggcaacatattgagaccctgtctctacaaaaaaattagccaggtgcggtggtgcacgcccgtagtccctagctactcaggaggctgagacaggagaatcacttgagtccaggagttcaaggctgtagtgagctataattatgccactgcactccagcctgggttacagagcaagactctatctgaaaaaaacacaaaaacaaaataaggagataaacaaatagatttgagaggtatttagtgggtggaatcaacaaaacttggagattagagggagaagtgggaatatagggggacttagagggaaagtggtgatctttacttagccaattatgcgaaaagattaatttagagtgggtaaaaagttaaattttagacatggtgagtttggccatagaacatccaagcagatatgtccagtaggtgactagcattataaattttgagctcaagagaaaggcctgggctggaaatacagatcagggaatcacggccataaagactggggacttgtcatcatagagattaggaagttatcctcatagagactagggcattgtgttagtctgtttgcattctttaaaggaatgcctgagactgggtaatttataaagaaaagaggtttatttgtcttatggtcctgcaggttcagcctgtaacatggtgcttgtacacaagcagtatagtgccaacatctgcttctggtgagggcctcaggaagcttacaattgtggcagaaggcaatgggcatatcacatggtgatggagcaagagagaaaggaggaggtgccaggctcttttaaacaaccagctcttgtgtgaactaacagaacgagaactcgctcattactatggagaggacaccatgccattcatgagggatccacccctgtgacgcaaaaacttgccactaggcccaccttcaacattgaaggtcacattttaacatgagatttggaggaggaaaacatccagactgtgcatcatcgccatagagagtaggatgtcattcctatagaggttggggagttatcctcatagagattaaggacttgccatcctcatagtgagtagggagttatcaccattcagttggcatatgtagataaaatgagatgaaccaacatcccaagatggaacgctgtggatcattcatatttaaagggtatggtgtaaaagagaagctggcaaagtaggggaagtaggatggttattggaaaaacctggtgtcatgggagccaggaaaggagagtgcttatgtactaagatgtcaaatgtcagattgcacaagaaatgtagatactgagatgtgtccactggatttggcactatgaggttgttggtgatatttgtgtgaacagctttagtggaatgggatcaggagccagatacagtgggttcagcaagtagggaggtggagtttagaaaggcacttattgccaggagaattttaaaaaaaagcaagttagagaaagtcaagtaataagaactagtgtggcatggatcagctctctgggaatgctggagggagagaactgaaggggagagaagtggaataaacactataaaaagctctgagaagagaggatgtggcttcaccccacccaatcctgagagaatgggtggagggtaggcctaatattgtcttgttatccaaatattgtctttaccagctatcctttccctaaagatgggacaagccattcccagaggtcagttccaggcaacatgaccttcccagaaggtggggtaaaattttcctcattaactcatgtgttccccagagtctttgggtttttaggaatttctacaaagaatttcaaatattttacaagtcatttccaagtaccataatatattcttccttcagtttggtatctcaagcttttgttaaggtagagacacattttccttcactcagaacattgttgtaactctgaaggagaaaaggcatgtggaattactattgtctgcattggccttccttctgtggctgcaccactcctacttctgtgaatctgagcaaataagaaaacagaccacctgcatgtgagcaagaagcacacagattttgctgaatatgtggcttcagtggtcttcacgttgcttctgtgttctataggtagcccggttttatacagacagacaatctatttcacctgatggaatgaaaaggataagaatcatgtgaaaccaaacacataagagatggatgtgtaaggcataatacccatttagggattaacaatatcagctcattttttaaacttttaagctcaggggtacatgtgcaggtctgttatataggcaaacttgtgtcatgggagtttattgtacagattatttcatcacccaggtattaagcctagctcccattggttatttttccttatcctctctctcctcccaccttccaccctccaataggccctagtgtgtgttatgccactttatatatccatgtattctcatcatttggctctcacttataagtgagaatatgtggcatttggttttttgttcctgcattaatttactaaggataatggcctccagctccatgcctgttcctgcaaaggacatgatctcattcttttttatggctgtatagtattctgtggtgtatatgtaccacattttctttatctggtctatgattgatgggcatttaagttgattccgtgtctctgctattgtgaatagtgctgcagtgaacatatgtgtctttatgatagaatgatttatattcctttgggtatatatccagtaatgggatttctgggtcaaatgttatttctgtttttaggtctttgaggaatcactgcactgtcttccaaaatggttaaactaatttacactaccaccaattgtgtataagcgttcttttttctccacaaccttgccagcatccgttatttttttactttttaatgatagccattctgactggtgtgagatggtatcttattgtggttttgcattcctctaatgatcagtgatgttgagctttttttatatgattgttggccacatgtatgctttattctgaagagtgtctgttcatgtcctttgcccactttttaatggggttgttttttcttgtacatttgtttaaatttcttatggatgtcagatattagatctttgttggatgcataagttgcaaaaattttctcccattctgtaggttgtctgcttactctgttgatagtttattttgctgtgtatcgggggaaccagcccccaatatttcaacatacgttctttctattttccctaagtgttggccggtctgagaaataaagagaaagagtacaaagagagaaattttacagctggtcttccggggatgtcatcacgtattggtaggactgtgatgacgaccctgagccgcaaaaccagcaagtttttattagggattttgaaaggggagggggtgtatgaacagggagtaagtcacaaagatcacatgcttcaaagagcaataaaggtcacaaggcaaggcaaaattagaattactgatgagggcctatgtcccactgtgcatgcattgtcttgataaacatcttaacaggaaacagggtttgagagcagacaaccagtatgactagaatttaccaggctggaatttcccaatcctagtaagcctgagggtactgcaggagaccagggcgtatttcagtccttatctcaactgcataagacagacattcccagagtggctgtctatagacctatccccaggaatgcattccttccccagggttactccttgctgggaaaagaattcagcgatatttctcctactcacacatctatctataggctttctgcaagaagaaaaatatggctgtattctgcccgaccccacaggcagtcagaccttatggttatctttcctcgttccctgaaaatagctgttattctgttatttttcagggtgcactgattttatattgtttaaacacacatgttttacaaacaatttgtacagttaacacaatcatcacagggtcctgaggtgacatacatcctcagcttaagaagatgacaggattaagagattaaagacaggcataagaaattataagagtattgattggggaagtggtaaatgtccatgaaatcttcacaatttatgttcagagattgcagtaaagacaggcataagaaattataaaagtattaattttgggaactgataaatgtccatgaaatcttcacaatttattttcttctgccttggctccagctggtccctctgtttggggtccctgacttcctgcaacagctgtgccgaagctttttagttccattagataccatttgtcaatttttgcttttgttgctattgcttttggtgtcttcctcatgaaatctttgcccattcctatgtctggaatggtattgtctaggttgtcttccaggatttttatggttttgggttttacatttaggtctttaatccatcctgagttaacttttgtatatggtataaggaaggagtccagcttcagtcttatgcatatgtctagccagttatcccagcaccatttattgaatagggaatcctttccccattgtttgtttttgtcaggtttatccaagatcaggtggttgtagatgtgtggccttatttctgggtcctctattctttttatttttatttattttttatttttatttatttatttttgaggcagagatttgcttttgttgcccaggctggagtgcaatggcgtgatctctgcttattgtaacctctgcctctgggttctctattctgttccattggtctatgtgtctgattttgtaccagaaccaagctgttttggttactgtaaccctgtagtatagtttgaggtcagatagcgtgatgcctccagctttgttctttttgcttaggattgccttggttatttgggctctttcttggttccatatgaattttaaaatagtttgttctagttctgtgaagaatctcaatggtagtttaataggaatagcattgaatctataaattgctttgggcggtatggccattttaatgatatggattcttcctatccatgagcatagaatgtttttccatttgtttgtgtcatctctgactttttagatttattctgatccaaatgtgagtgaccatggcctgtcagccctcgggaggtcctgagaacatgtgcccaaggtgatcggggtacagcttggttttatatattttagagaggcatgagacattaatcaaatacatttaagaaatacattggtttgtttcagaaaggtaggagaactccaagtgagggctaccaggctataggtaaatttaaatgttttctgtttgacaattgcttgagtttgtcaaaagacctgagatctataaaaaggaatgttcaggttaaagataaatgattgtggagaccaagttttattttgcagaggaagctctcagatagcacacctcagagagagagagcaggttgtaaaatgtttcttttcttttcttttttcagggtaattagcatatccatgaattttttttttctgttttgaatgatttatttcccaccttctttttttaaaattatgcgttaagttctagggtacatgtgcagaacatgcaggtttgatacataggtatacatgtgccatgttggtttgctgcacccatcaactcatcattcacattaggtatttctcctaatgctatccctctccaaaccccccacaccatgacaggccccggtgtgtgatgttccccgccctgtgtccaagtgatctcattgttcaattcccacctatgagtgagaacatgtggtgtttggttttttgtccttgtgatagtttgctgaggatgatggtttccatcttcatccatgtctccgcaaaggacatgaactcatccttttttatggctgcatagtattccatggtgtatatgtgccacatttttttaatccatcactgatggacatttgggttggttccaagtctttgctattgtgaatagtgccgcaataaacatacgtatgcatacgtctttatagtagcatgctttataatcctttgggtattgctggtatagtttgaggtcagatagcatgatgcctccagctttgttctttttgcttaggattgccttggttatctgggctctttcttggttccatatgaattttaaaatagtttgttctagttctgtgaagaatctcaatggtagcttaataggaatagcattgaatctataaattgctttgggcggtatggccattttaacgatatggaatcttcctgtccatgagcatggaatgtttttccatttgtttgtgtcatctttggctttttagattgctgggtcaaatggtatttctagttctagatccttggatcaccacactgtcttccacaatggttgagctagtttacactcccaccaacagtgtaaaagcattcctgtttctccacagcctcgtcagcatctgtcgtttcctgactttttaataattgccattctaactgatgtgaggtgatatctcattgtggttttgatttgcatttctctgatgaccagtgatgatgagcattttttaatgtgtctgttggctgcatagatgtcctcttttgagaagtgtctgttcatatcctttgcccactttttgatggggttgtttttttcttgtaaatttgtttaagttctttgtagattctgaatattagctctttgtcagatgggtagatcgcaaaaatttcctcccattctgtaggttgcctgttcactctgatggtagtttcttttgctgtgcaaactttttagtttaattagatcccatttgtccattttggcttttgttgccattgcttttggtgttttagtcatgaagtccttgcccatacctatgtcctgaatggcattgcctaggttttcttctagggtttttaaggttttaggtctaacatttaagtctttaatccttcttgaattaatttttgtataaggtgtaaggaagggatccagtttcagctttctacatatggctagccagttttcccaggaccattcattaaatagggaatcctttcctcatttcttgtttttgtcaggtttgtcaaagatcaggtgattgtagatgtgtggtgttatttctgaggccactgttctgttccattggtctgtctctctgttttggtaccagtaccatgctgttttggttactgtagccttgtagtatagtttgaagtcaggtagcgtgatgcctccagctttgttcttcttgcttaggattgtcttggcaatgtgggctctcttttggttccataggagctttaaagtagttttcttccaattctgtgaagaaagtcattggtagcttggtggggatggctttgaatctacaaattaccttgggcagtattgattcttcctatccatgagcatggaatgctcttccatttgtttgtgtcctcttttatttcattgagcagtggattgtagttctcttgaagaggtccttcacatcccttgtaagttggattcctaggtattttattctctttgaagcaattgtgaataggagttcactcatgatttggctctctgtttgtctgttactggtgtataagaatgcttatgatttttgcacattaaatttgtttcctgtgactttgctgaagttgcttatcagcttaaggagattttgggctgagacaatggggttttctaaatatacaatcatgtcatctgcaaacagggacaatttgactttgtcttttcctaattgatacttctttctctggcctgattgccctgtccagaacttccaacactatgttgaataggagtggtgagagagggcatccctgtcttgtgccagttttcaaagggaatgcttccagtttttgcacattcagtatgatattggctgtgggtttgtcataaatagctcttattattttgagatatgttccatcaatacctagtttattgagagttttcagcatgaaggtctgttgaattttgtcaaaggctttttctgcatctattgagataatcgtgtggtttttgtctttggtatagtctgttgatttgggatggagagttctgtagatgtctattaggtctgcttggtgcagagctgagttcaagtcctggatatccttgttaaccttctgtctcgttgatctgtctaatattgacagtggggtgtaaaagtctcccattatcattgtgtgggagtctaagtctctttgtaggtctctaaggacttgctttatgaatctgggtgctcctgtattgggtgcatatatacttaggatagttagctcttcttgttgaattgatccctttatcattatgtaatggccttctttgtctcttttgatctttgttggtttaaagtctgttttacaagagactaggattgcaacccctccttttttttgctttccatttgcttgttagatcttcctccatccatttattttgagcctatgtgcattcgtttcacatgagatgggtctcctgaatatagcacactgatgggtcttgactctttatccaatttgccagtctatgtcttttaattgggacatttagcccatttatttttaaggttaatattgttatgtgtgaatttgatcctgtcattatgatgttagctggttattttgcccgctagctgatgcagtttctttctcgtatcgatggtctttacaatttggcatgtttttgcagtggctggtactggttgttcctttccatgtttagtgcttccttcaggagctcttgtaaggcaagccttgtggtgacaaaatctctcagtgtttgcttgtctgtaaaggattttatttctccttcacttatgaagcttagtttggctggataggaaattctaggtcgaaaattcttttctttaagaatgttgaatattggcccccattctcttctggcttgtagagtttctgcccagagatccgctgtaagactgatgggcttccctttgtgggtaacccgaactttctctctggctgcccttaacattttttccttcatttcaaccttggtgaatctgacaattatgtatcttggggttgctcttctcgaggaatatctttgtggtgttctctgtatttcctgaatttgaatgttggcctgccttgctaggttggggaagttctcctggataatatcctgaagagtgttttccaacttggttccattctccctgtcactttcaggtacaccaatcagacatagatttggtcttttcacatagtcccacatttcttggaggctttgttcatttctttttactcttttttctttaaacttctcttctcactttatttcattaatttgatcttcaatcattgataccctttcttccacttgatcgaatcggctaatgaaggttgtgcatgtgtcacatagttcttgtgccatggttttcagctccatcaggtcatttaaggtcttttctacactgtttattctagttagccatttatctaacctaaggtttttagctttcttgtgatgggtttgaacatgctcctttagttcagagaagtttgttattactaaccttctgaagcctacttctgtcaactcgtcaaagtcattctccatccagctttgttccattgctggcaaggagctgcaatcctttggaggagaagaggtgctctggtttttagaattttcagctttcctgctctggtttcaccccatctttgtggttttatctacttttggtctttgatattggtgacctacagatggggttctggtgtaggtgtcctttttgttgatgttgatgctatttccttctgtttgttagttttccttctaacagtcaggcccctctgctgcaggtctgttggagtttgctggaggtccactccagaccctgtttgtctgggtatcaccagcggaggctgcagaacagcaaatattgcacaacagcaaatattgctgcctgatccttcctctggaagcttcgtcccaaaaggggacccgcctatatgaggtgtctgctggcccctactgggaggtgtctcccagttaggctacatgggggtcagggacccacttgagggggcaatctgtccgttttcagagctcaaacaccatgctgggagaaccactgctctcttcagagctgtcagacagggatgtttaagtctgccgaagttgtctgctgccttttgttcagctaagtcctgcccacagagatggagtgtagaggtagtagggcttgctgagctgcggtgggctctgcccagttcgcacttccaggccactttgtttacctactcaagcctcagcaatagtggatgcccctcccccagccaggcttccaccttgcggttcaatctcagactgctgcactttcagtgaacaaggctccgtgggtgtgtgacccgccaagccaggcacgggagagaatctccttgtctgccagttgccaagaccttgagaaaagcacagtatttgggtgggagtgtcccgttttccaggtgtaatatgtcacagcttcccttggctaggaaagggaaatcccccaaccccttgtgcttcccaggtgaggcgatgccccgccctgcttcagctcaccctctgtgggctgcacccgttgtccaaccagttccaatgagttgaaccaggtacctcaattggaaatgcagaaatcacccatcttctgggtcaatcacactgggagctgcagactggagctgttcctattcagccatcttggaatggatccttctctgacttttttgagcagtgttttgtagttctccttggagagctcttcctgctttggctctcagcttgactgatgttggtgtatggagtgttagggagctttgcacattgattttgtattctgagactttgttgaagttgttaatcagcttaaggagctttggggctgagaccatggggttttctaggtataggatcatgttgtctgcaaacagggatagtttgacttcttctcttcctatttggatgccctttatttccttctcttgcctgattgccctaaccaggacatccaatactatgttaaataggagtggtgacagaggacatccttgccttgtgccagttttcaaggggaatgcttccaggtcttgccatttagtatgatgttggctgtgggtttgtcatagatggctcttattattttgagggatgttccctcaatacctaatttacagggagtttttaacatgaagaggcgttgaattttatagaaatccttttctgtgtctattgagataaccatgtggtttttgtctttaattctgtttgcaggatgaatcacatttattgatttgcttatgttgaaccaaccttacatcgcagggataaaggctacttgattgtggtggataagctttttgatgtgctcctggatttggtttgccagtattttgttgaggatatttgcatccatgtttatcaaggatattggcctgaagttttcattttttgttgcatctctgccaggttttggtatcaggatgatgctcatatgcctcgtagaatgagttagggtgaagtccctcttccctattctgggaatagtttcagcaggaatgataccaggtcttcattttttaccttgtagaaaaattgacatggcaagacagcttggtagacatgaaatcagaagtgggggagttagtttgattatcttagaggaggcattcttcatcactgtaggggaaaaaactttcaaggaaatggtgtacttgagtccacatgccaaggcaccttctttccccagaccatgctagagatactttgacagattattttagttgctttttttttttttaataattttgttgatcattcttgggtgtttctcggagagggggatgtggcagggtaataggacaatagtggagagaaggtcagcagataaacacgtgaacaaaggtctctggttttcctaggcagaggaccctgcagccttccgcagtgtttgtgtccttgggtacttgagattagggagtggtgatgactcttaactagcatgctgccttcaagcatctgtttaacaaagcacatcttgcaccacccttaatccatttaaccctgagttgacacagcacatgtttcagagagcacggggttgggggtaaggttatagattaacagcatcccaaggcagaagaatttttcttagtacagaacaaaatggagtctcctatgcctacttctttctacacagacacagtaacaatctgatctctctttcttttccccacatttcccccttttcttttcgacaaaaccaccatcgtcatcatggcccgttctcaatgagttattgggtacacctcccagacagggtggcagccgggcagaggcaccccccacatcccagacagggtggccaggcagaggcgccccccacatcccagatggggtggccgggcagaggcgccccccacccccaagacggggcggccgggcagaggcgccccccaccccccagacggggaggccgggcagaggcgtcccccacctcccagacggggcggccgggcagaggcgccccccacctcccagacggggcggccgggcagaggcaccccccacctcccagacggggcagatgctgggcagaggcgccccccacctcccagatggggcggatgctgggcagaggcgcccccccacctcccagacggggcggatgccaggcagaggcgctccccacctcccagacggggcggatgccgggcagaggtgctccccacctcccagacggggtggccgccgggcagaggcgctccccaccccccagacggggtggccgccgggcagaggcgctccccacctcccagatggggcggctgggcagaggcactccccacctcccagacggggcggcggggcagaagtgctccccacttcccagacggggcagcggccgggctgagatgctcctcacttcccagatggggcagtggccaggcagaggtgctcctcacttcccagacggggcagctgccgggcagaggtgctcctcacttctcagacggggcggccgggcagaggcgctcctcacctcccagaaagggcggccgggcagaggcgcttctcacttcccagacagggtcgcagtcgggcagaggcactcctcacttcccagacagggtcgcggtcgggcagaggcactcctcacctcccggacagggcggccgggcagaggcgctcctcacctcccggacggggcggccgggcagaggcgctcctcacctcccggacgggttggccgggcagaggcgctcctcacatcccagacggggtggtggccaggcagaggcactcctcacctcccagacggggtggcggccaggcagagacgctcctcacctcccagatggggcggtggctgggcagaggtgctcctcagttcccagatggggcggctgggcagaggcactcctcacctcccagacagggcggccgggcagaggtgctcctcacttcctggacagggcggctgggcagaggcgctcctcacttcccggatagggcagccgggcagaggcgctcctcacttcccggacagggcggccaggcagagacgctcctcacatcccagatggggtggtggccgggcagaggcgctcctcacttcccagacagggtttagttgccttttttattctatgtagatgaccccatccccaccatattcacatattccttcttcactcaggtacaaaattcagtaggacacgactttctgagtcatatgctggatttgaggagatactgaagccacaagactgaaataacttttaaactgtgggtgatttggctaaaagctactctcatctattatatattcatcttactagttttgctctcagaggaagttcctgtttccaaggtaaaggaacctttctctaactccacctaccttcctcctcactaaatgggtacagaaaatatgcttagaaaaaaacgcagaggaccctgatattgtcattctgaaatatcagtagtatctgtcacattttgacaggaactagatactaatcaatttataagattgagttttcatgtttctaaagtgcagatactctgtgttgatggttaaagagaaagccagctggttaggtgtcagatgatctctgacagtgttaccatagacatttaattgcatgaccatatcttatccagatggcatttctcgcttacacagatacataaccccagaggggcagagggagagatgtcaaatttccctcaaaatagaactttgagtccacccaaagtctaccaagtgagactttacaattctgcccaaagagtacagaaattacattgatctggcaagaaagaatgaatgggaacccaaaggtagctgcttgagttaatcaggttggtgagtggctgacagggtgctagagtgggcaaagtcaacattaaaccaccagcgcacaacttcctatgtacccaatgttcaccttcccagctcctatcatctttgccactttactctgaactggaaaccctctgtacattttttcctctttaactcaaagcctttagaactctcgagctcaagcagtcccctcctgcctcagcctcctgagtagctgggaccacaagcacacgccaccatacctggataatttttaaattttttgtagagatagggtctctccctatgttgcccagattagtctcgaactcctgggctcaagtgattattctgcctcggcctcccaaagcactggggttatgacccaccacgcctggccccacatcttgtttttcacataatgaaatgttttgaagacagtttgtgtcaacattcatagatctagctcagtctttttcatgtctgcatagaattatgtattatgaatgtggtagaatttatatatccagacatcagttgatggacttttagtcatttttagtcttttgccattacaaacaatgctgcactgaatgtcgctgtctatgcaccattttttcacatattcataagtatatcagcaggttaaatttctagaattagaattcttcagtcaaaggatatatgtgctttaccctttgatagatgttactcaattgcctccccatcaaagaggttctacaaatttttactcctacaaacatacaagaagtatctgttttcccacatctttgtcaacatatataatttctttactgaatttacagtaaaattcactttttaaggtgtaaagttctatgaattttgacaaacatataaagtcatttaaccaccatcacaatcaaaatctagaatatttctattatttccaaaagctcctttgtggccctttgtagtcaatcctctgtgcccatcctgagcctttgcctactgatctaatttctgttcttagttttgccttttccaaaatatcatatcaatgaaagcacaaagtaaatagcctgtttgagtctggtttcttttacttagcataatgcttttgagattcatacatattgttacatttatcagtagtttattccttttccttattgctgagtagaatttcattgtatgattgttcccaatttgtatacatttgccagttgctagcatttggattgttttgaggttttggcaattatgaataaagcagttggaaatatctaggtacatgtctttgtgtggacataggtctttgcttttctcaggtaaatacctcagtgtgggattgctcaattttatggtgagtttttatttaactttataagaaactgccaaacactttctcaaagtggctttgttatttcccatccctagcagcaaggcacaagtgtttcagttgctctgcattcttaccaacatttcatattgtcaatatttaaaaaattttggccattctaataagtgtatagtgaatattatgtatttatcaaactttaaaaatgttgctattctgaaaattatttttttcatttacatttctttaattaagggtagttagaatacatttaatatgttgataacacatatttctttttctttgaattgcctattcatcttctttgccatttttctattaggtgagctgatcattttcttaatgattttaaaatgacgcttatatattagtgaatccaactatttcataattgttgcaaacttttgtcattttttactttgatttgttaacttacagaaatacaatttacaaattttgaagagaagaggagactttatttcttataaaaggttacagcctgcaggatggccattttgacaggttgggaagtatagcctccagtcagaagccagaaacatatctggagggaggggcaaagggaacaggaatttacacagagctggtggccaaatatacatattcaataagctatagaaggagtcatgaatatttatgaagggagaaccatctgcatgtgtaattgagccttctgcttctccatgttcaaaaaatggtggtgaccttaggtggagtttttggccctctgacatcaaaacatgaagcagaggatgtgaaaacactagctgcctattcttcatagactggccagaaccaccccatagttagtggtctcttatcaggcagaaaagatggggcagcatcagggagtcggttgatatcagtggtggagccttttgaaagggctggtttctgttaggcccttgagaaggaaagcctactcctggttagcaagggagagggtctgagcccctcccaccctccattccatcttggccgagaacgcagttttcaaggtttctctggggtccccttggccaaaagatggtctggtcagttggggggcttagaattttattttgtatagcttatagcacatttttctatagtaatatttgtatgtaacctctaaattttgtacctcattggtgcaaaaataaggcggtataaatgagagagtttataaaggcaaggtatacaagacaagactataaggctaggcaccctggttgagtcagttcaccctgcttccactattatccagcactagagatgcatggccaatacagattttcttgcttattctcaccatctgcaaataaccaaggcttgttgacaaatgcagctgctttgagaaagggtagagtccccagggcacaatttttcaatttcagatgtggaagaagactcgtttagtggaagcaatgcgcttattgctgaggccatcaatataccagattgttacgccttttggctgggacacagggaattcctgtctgcagagtcagtgacatcactttgccggaaacagccttcctccctgccaaccctacacttaaacatgggattccacactgaccacaaaggcctattattctcaatgcaatctatgggcaaaagaatttgagggaggctagaaggggtgggggcaagagagaatggatggtttggttggaggaagtgagaagaatcagggaagaggactcttttgcttcctcatttcccatacatagagcctctgtcaccatttgatttttgcgatcattaacatttttagagtcaggtataaccaagtgcaaaccagttatgttagttacatgctgctaatctgagaagagtgtgttgcccaagaactgtgggtggggagcctcaggttggctgaatctgatttgcaggaagagcttgttctgcacccccacccacatctacactatctggatgtcaccaaataggctctccccacccaaagctgagtctcaaggggtccactcagtatcagccaggctacgttgttaagataaatgcaattgttttctaactaagaagctgtgaaccgagaataattggctaattaaaagttcaaagagtggaaataaaatagcattaaaaagagccagtaacttcctctgacgtctgtggttcaagagatcagtggaacaggacatgggttatttactcaattaccttgtctttctacctttcttttcattctcacccccaccccttcccttccttcttatttcctggctctattttcttacctgtgtctcccaacccaatgtccatctcatttttcctccttcttttttgccttttgccctttaactaactggttatcattgagatctttaggatcaaagtttgtctttagcagttgtgtttctattgatgtttgtgctgacttctttaagtaaaatataggcaggaaaaaacccgctaaattaaactgctttatccttgaatgtgactctggattggttaattggagaaatatggggttggggtagaataagacctttccatttagatagaattttggactagtgcttttgcattgggtcagctgagaaagaataaaactgaaaaatttctacgcatctctaatgcaggacaatgatttaaggcattgaagtggaactgagacacttggatcaaatccctgttctgccacgtgcaaggtgcatgacttgggcaagtcccttaagcttcctgagaaacacagtctcagccttttgtcacttaactgtaagcttctgactgtcagggatgagattcatgatttcaaaaggtaggacattggtatcctcagtgagaacagtccagacaacccttccagccaaatcctcaatgttggtcactttttatttctggataatgagattggctaccacataacagtactggtagcacagcccagacactgtatgagcctcagtcatgtattgtagggtagggtgctggttaaaagcctggaccttgaagccagaatgcccgtgtttaattcctggccctgttaccggtggcagctatctgagttactggcagtgtatccatacgggtctgcagtaacctcaattcttgcctcatcagaagaaagaatgtgagggatataaagtagaaaaagagactgagtcaagtttcagagcaggactggaagtttattgaaaaggctttagaacaggaaagaaaggagagaacccttggaagagatccaagtgggcaacttggagaacaaacaacgtgtttagctgtgatcctaggactttataggcggccatcttgagcccttttcccgtgattcttcccttagggtgggctgcctgcacgcacagtgccctccttacctccttgagcacacagtgtgtttaggaagttgtgtgcatgctcatctgaggctttctttccttttccggtggagtgctcccggcaagtcatcttccaccttttgtctcttaatgtgcatgcccaggaagttgcttctccctggtgcttgaattcaattaacactttaatgttacagctgtggatcagcagattttctctccctggctccagctgccaaattatcatttttagagaggcaatgtgataactgtcaaaccatcacctgatatttctagttggtgggggagaagagccctttcctgccatgtctgtctaactacatgtaacagcgcaacatttacatcagtgtaactttgggaagttacttaatctctctgtgactcagtttcctcatctgtaaactaacaataatgataattataatagtgactgtgagtgtgactttatttggaaatatagtagggtgttcagagatgtaattaagctaaggatcttgagatgaaatcatcttgaatttagggtgggccctaaatctgatgactggtgtccttatgagagaaaggagaaggaaacgtgacacaaagagcaacagggggaaaggccatgtgaagacagaggtggagattggagtgatgcagccacaagccaaggaatgctaagaagctgaaaaagacaagaaagacatctcctccagaaccttcaaagggagcatgcccctgctgataccttaacttttggacttctggcctccagatttatgaaagaatacatttctgtttgaagccagcaagttcatggtaacttgttgtggcagccctaaaaaactaatacagattttatagagaagatgatagtattacgtgcaccttataggattgtagtgaaggctaaattgatggctgcatttaaagtgctaagagtagaatctggaatatagtaagaactctttagtataggctattacgtgttgttagctcattgaaccttacatagcaaccctatgaagcagatactattgtgactcccattctgcccatgaggaaatggaggcttacagagactaagcaaaggtaagcttatctgaactctgctctagcttgaaccatcccccagaagtctgtggagtttgactaactgctgatggatcctgatgattgttggctcggtgacccttcctgatgatggtctctcagaaaagactctccagtgctgagccatcaagaagtctagaaggcattgagaaggctgtcacatgtgattatgtttactcctcctggatgcgtctgcccagacctggttttggcacaagctctgctctgatggagccaggctctgtccacacttggctgtgtggcctgacctcatttgagtagcctcagcacatcattaccacaagaggcagggatgtgccaccctaaaaggccacaccctctctctccagtgacttcaacagcccccaatggttccttgttcacccctaagttgctaagcatagattatatgaatgactttagaagtaagtcacatcactcagaataaggcaaagccctcactagtgccctcaaggccttatgagcaggggaccccattgatcctctgaccagttcctactactctcccctcagggcctttctgtgtacagttccagatgctgtaaagctcttgcctcagaggtatgcaggctttctccctgtgatagaaatcaccttctcaggccagtcctaatcactgcatccttcctttttaccttccttgctttttcttcctcctcagcacttaaaattatgtaatacactgtaaattttgtttatcttgcttattgtatttttctcccaactagaatataagcaccatgaggatagggacatttctcactttgggttattgctgtagctcagagcctagggcaggtctagttcatagtaataatgtgttcaataagtaattattgagtgaccaactgaaaaaatgaatgaggcatagtcccctctccaacaactatagaactcccaaactgaaatggttcaagctatatctagaggtagcacatgaagagaggactactgacataactgagctttgtagagtatagggggagcatagcttccaactgagcttgattttgaaggagacaaaaagacttggagaatgaggggaatggaattacaaatgaaggcgtcccacactgagaaaagttcagagaatccaaaattcattcattcattcattcattcatacaacatgggatataccaatgaacaagccagaaaaaagtccctgccctaaggagcttacattctagtagtcataatgtcaggaattctcatcttggacccaaacagatctgttggttggaatggtaaaatgggaagggctgaaatttctgaagggcttggaggtctaggtagaccagtgtagctttcatctggcacacagcaggacataggttcttgataaggtagagtcttaggaacgtcaattgtggaagatttctatagccacatgaaggagggattctgatagagaagataattaggaagtgtgggagtcaccagaaagggccattgtagaagatcagatatgaggtaagggtgactggaatcaggggatgtggatatcactatagaagaaggtgggtctaaggggcttgggatgaaataactgagagaggatcttcaagcccctgagtgtgagaacaacctacatatgtgtcctcaagaagagttccctgatggagaagaaggaaggtagcaggggtggtgtggagactttgactctgtgagttggaggaacgacaacgccagattaggaccagtcttctgagcttcagtgattgttccatcattaggctatgtaaacacaggaaggaccacaacattccttgaatgtttgctcaccaatgcttgtccacatttgctgttttgttctctatatgacaagaaaagtttagtccagatgtgactcataacaaattggaaacaatttgaatctagtcagtcacattggatctgcaaagcaaaacttttttttgcctgaaatccaccacatctgtcaacaccccaaatctgtttattaatggagtaaaattttaagctgttatatttttgttatcacagagtagcaatgctgggatttctctatacaacagaattttgactatggacaaaattaaataatttgtttgtttgttttggagacagggtctcactctgttgcccaggctagagtgcagtggtgtgatcttggctcactacaacctcggtgtcctgggctcaagcgatcctctcacctcagcctcccaaatagctgggactacaggcatatgccaccacgcctggctaatttttgtattttttttgtagagacagattttcaccatgttaccccccagtctcaaactcctggactcaagtgatccgcccacctttgcctcccaaagtgctgagattacaggtgtgagccactgcaccctgccgagattaaataattttgattttcaccttagtatgattataactggacatcatgatggctgtttctataagaatcaaaagaacctttgcttcctttgattcttataaaagtcttgaaggtatttttcctctgacacagctaattggcttgaaatcagcctgtgttttttcaaagcttgggtttccttcagttttatctctctgtcaggtgaagagttgaagttaatattaccttgctctctcactttaagctgaaaattcccctcccttgtcacatcacatgaaaagaaaaaaatgcaaaggaagtggccgtcttaaattctccagtacagtaagccaattcaaagggaaaacaatgacaacactttgccattggatattttggtaaaatcatttgttgaaattctgtttcgaaataccatttcacattgtatgacagaaaccacatttctgttatccacaaggcaaattaagggcttttcagggggaagacaatcaatgtgaattttccataatagagcttgactgtggcagtcatgggatctgaaagcactctgggggtctaagaagaaggggcagttacctaagtaattctctttttatgaacacatccaagatatgtcaacctgcaccccacctctagcacctcttctttggcaccacttctgagatgactctcctgcttcctggatgtgatcagggcttttgaaaactggctgacatatagtccatggaagatagcattttaattactgctctctgggtaatgtagtcagttacatgaaaaacaaacttaaccattgtgggttcttttggtaataaaaacatttgaaaaatcatgtatgaaaaattcctaaattttctctctgacctaaaaatctttttcttattatatctttaataagaaataagagtaggatgaaaggcttgcatatattctggtaacctggatatcattgcaaaagctgggaaaatgtggaaaagtgtacatctaactcctcaatgacaagaagaagttagtaaattttctcgttaggaaaaggaagaaataattatagtcacatcaagttggttcccacctctgggttcttgcagtttctgttccttcttcctcttatgttcttactccctctccaggctggtgttttctcctcaaatgtcaccttcaaggtctcggctcaaatgtcatcttctgagagaggctttcttgaccctcaatctgatacctttcccttcattcccaattctaccgcaagtcactctatcaagttccttggtttgaatttcttcttagcacatattgtgacctgaaatcacctatttatgtgcttcttttctggtttatctgtcttgctaactagattgtaaattccaaagagcaggggccttatcagtttttctttttttattgtagtaacttggatgctaagaatagtgcctgaaatggccatggaaggaaaatgagattgcaagattgtcatatttacaaaaacaaaagaagttaacaagtagaccttgttgaatagcttgagggagtaaaacattcaaaattttattatggtagaaacattgctacagtttgtttgttgttatatttataattggttgttttatttataattgcttatctaaaggacatgctgcttagggctgtgtttgtcaacatcacaacgttgggaaccaaagtggggtgcccttagagggttcttttccagattccagaacactggcatcaaagaggacatctctcccataccagttttatccagatgttttagcttcaagtagttaaaatcctgactctaattgggtcaaagcataagttttatggaaggatgggctcagcatttgttgatttagcagcttaaaatgccatcaaggactcacgttctctacatctctctgctctgccatcattgaatgccatcccttccaggcaggacaatgtttgaggatgaagagagaatgttttcttttttccctagacttgccccagaagacttcctccacggtcacatgggccataattaggtggcatacccattattaaaccagtcactggtgagggaatgaaattacacagacaagtccatccctgagcttgggggaaaggcaagcatctgaacaaaatggagtttcttttgggaagggagaagcagggaagtgctgtgtatttcacctgctcttccttgtttggaagcaatagataatgatgttgctaaaactttttctcctaaattttgtattgtttggtctgatgggtaaagactgcctcaagattctggggattgaggtggattggagacccataccttaatccaagcttagacttggattaagttcaagcttctgctcaagagcttcagagagagctcccatttcagtgcccagccagcttctacgtttgggaatagtttggggagttgagagaggaggaggttgagttgtcaaaatggagggaatggtgcaaccatttcatttcctgttcacttcctctatgcaatctgtttacatctgaccaaagtagcttttgccttttttttttttttttttttttgagagggagtttcactctgtctccaggctagagcacagtggtgcaatcttggctcacagcaacctctgcctcctgggttcaagtgattctcctgcctcagcctcctgagtagctgggatggcaggtgcacgccaccatgcccatctaatttttgtattttcagtagagacggggtttcaccatgttggccaggatagtcttgatctgttgacctcgtgatccacctgcctcagcctcccaaagtgctgggattacaagcgtgagccacggcacccgtttttggttattatttttttgagatggagtcttgttctgtcgcccagcctggagtgcagtggtgcgatcttggctcaccgaaacctctgcctccggggttcaagcgattctcctgcctcagcctcccgagtagctgggattacaggtgcccaccaccatgcctggctaatttttgtatttttagtagagatggggtttcaccatattgacctggctggtcttgaactgctggccttgagatccacctgcctcagcctcccaaagtgctgggactacaggtgtgagctgccgtgtccggccacttttgccttttatataattctactattggagcttttctaatgtcccatgacagaatgagactaaagacaaaataaataagataatatgaattatgatccaaaatgttcaagactcctcagcctctatgccattaccaattgcttactatgtaagggtggtttaaatgcaaggggtatgtatgtcaagccaggaaatgtcatggaatagtgggatttgttgtttgatgatacattcttaatactttttaacatcataaacattttgtggtagatttcaaaaatgaggaggggtattcttgttttttgttatttgttacttctaccttgatagatctgtgtgaactgttaaacagccaatttggggctcttctcactcctcattccatatctgatcactgacctagttttgtccttgccacagccactaactcagtcttggcctttgtcaaagtacaaacaaatccttttgttcttgaattatttcccaattactctgtaagtacctcattgataaaaaagattggcttttaatctgtctctgatgtctccaggtagccattacaagaccagacagaaaggggaggaaaatcagtgtttttgatttcttgttggtatttttttcttctgcttttggttttagagtctaacgtgaagacattttgctccaagaatatcctagccatccttggcttctcctctatcatagctgtgatagctttgcttgctgtggggttgacccagaacaaagcattgccagaaaacgttaaggtaagtcaaatatatctgtgtgtttgtgtgtatgtaagaggagatctgggtgggacagggggaggagggataaggtatgtagagcataggggacgagttgaggttctaacagcccaggaacaagtcaatttccactggattaggggagtaaaatggaaataggtgctcattctagaagagtaaatgccttgaatcattagtggtgggaagttaactgcctttatgattgtttagtaaactcattaaattgatactctagcagagatgaatgctttattcaccttatccagatctgtgtaatactatgccaagattctatattctagtatatttccacttcttcatcatgggtgaatcacaatactgcactctgttctttttacttcattattatcactatcaccaaaacaataacgtttattatacaactctgtataaagtactttggaagtcagagattgaggagaagacatgtttcttatctccagatatagtaaagaatcaaaatcaataaaagcaaatcagaaaacatatacgtgtatcaggtatagtcatttgaaatgaattcatggataggcagatttcttgtgacatttctacatttgaacaactagttaatatcattaaagatcattaggatcattaactttaatgtatttatgttttctttccagttcatcaaagtaaaatttcagacatgaatatctcacaagtactttgtaatatggtcattatattttttaatctgttaattaaaaagcatgtggtaaataaaaatttatactataaatacaccattttaaactttcactgaaattatagtaaacaaatatataagggcccagatgataccaatatgctaatatgcatgtatgtacacatgggcagtaatatatctagaagttaacttgaccatggaggcctgggaatacatgtgtagaagtatattctcttgtatttgaagatgttgaactgggagcctggaaggatggttgtgtatgccaggcctctgaaacttttgccatccacccaaatcactgtatagcagaggcgtgggtgtcacactggcatctttttgtcaagttcaacccagtggtgctgtgtacagcagtccctttgtcaagacagaaggctgatactatctcattgttaagggtcgcttgccttttaatgttgactgatgttgtttccttggcaaaacttcactcacagttgaagcctcatgacatcttggttccattatttgtttaccagctccaaaaatacatggttgccttcttaatttgacctttttacatgttcagtattgcatcattggagagggggatgcctaggaggcaaaatccatgacaaacttgagttatgttcccaagaatatgtgtggtcatggacgaccttccctcattcacagtggtctcctttaagtctcttgtgcttctgcattgttatatgggcctggcaaaatggaacaaggtctttggcattctttaaataaaaggtaggagtattgaagagcagtcattggcatctgaagtgaatctttttaataacatcactgatttattttatacaaagatagttttatatatgcaaactagccatttgttgaggttatataataattttagtaagattcctggcatatattgggggcaaaatatttcaggaacttgtattctggtgatggctttaaaccagatgtgctgtccaatttgatagccactagccacatgcagctctttaagcttgtcaattaaaattaaataaaattaaaaattctgtccctctgttgcactagccacatttcaagtgctcaatagccatacatggctggtggctactgtattggacaacacagatatagaatattgccttgctgtagaaagttctattggacattgccactttaaagcatactcttgaatgataactctgaagtcattcaaaactaagtttaatgaatagggtgtatgataaaacattttataaaatctagaataagaaacaaaaaaactttttttcttgcatggtttgtaaactagtaccaggatcatcccaaatatcatgggctactaaactggtttgagtagtttattgaaataaatgtatttgcttccaaaaatgaccatttaaaagataacacttatttggatatttgtactgatacatgttttttgtttgtttgtttgttttttgtttctttgtttggggtttttgtttgtttctttttcaagatggagtctcgctctgtcgcccaggctggagtgcagtggcacgatctcggctcactgaaagctccacctcctgggttcacgtcgttctcctgcctcagcctcccaagtagctgggactacaggtgcccgccatcacgcccggctaatttttttgtatttttagtagagacggggtttcaccatgttagccaggatggtcttgatctcctgaccttgtgatctgcctgcctcagcctcccaaaatgctgggattacaggcgtgagccaccgtgcccggctgatacatgtgttttgagagcacacaatgacatgactttatgaccatacttcattcagcagttcttcattcattttttataaatttatgcatcgacaattatttattacactccagtctggctgacagagtaagactctgtctcaaaaaaagtaaaataaaaaatattcattgtctgtgttaggcactgggctacacaatagggaaggcagtatatagatatgactgagcttaccatctggggaagcaaacatatttaataacacaaattattaattgtaattatgataaattgccaccaaatgaaagttttggggccaggcaagtcttccctgaaaaaatgatactaaaataatatctgaagaatgattggaagttagctgggaaagacataggtaaagggtagtccaggcagggccgagcacggtggctcatgcctgtaatcgaagcagtttgggaggccgaggtgggcagattgcctgagctcaggagcttgagaccaccctgggcaacatggtgaaacccaatctctactaaaatacaaaaaattagcttggtatggtggcgcgtacttgtaatcctagctactcaggaagctgaggtgcgagaatcacttgggccccagaggcggaggttgcagtgagccaagatctgccactgcactctagcttgggctacagagtgagacgccaactcaaaaaaaaaaaaaaaaaaaaattccaggcagaaggaaagcaggtgcaagagtcctgaaacaagaaggagttggatatctcctaggaactagttggagagcaggagtgggccacgtgttatataaagatggggaggtacgtggtgcaggccctgcaagacaggttgaggatttcagttttaatcctaagagtagtgggaagctagtggtatgatcagatttgtttttgcaaagatcactctgatttcaatgaattagaggaggatgagatataggaggataccaggaagaggctacaagaaaaatgtggaaggagggggagcctttgggttcaatttttgaagaattgttttgagtgttggaaagccaatgggaaatgtcaagaaagcagttggataatcagatttggacctttcttttctaagcagatatctactgctgtgctcaataaaaatataaaacaagccaaattttaaattttcaaagagctacattttagaaagtagaagaaaagaggtgaaattaattttaataatataatttatgtggcccaatgcatccaaaatattacctcaacatttcatcaaaataaataattgttggctgggcgcggtggctcacacttgtaatcccagcactttgggaggctgaggtgggtggatcacgaggtcaggagttcaagaccagcctggccaacatagtgaaatcccgtctctactaaaaatacaaaaaaaattagccgggcgtggtggtaggcacctatagtcccaactacttgggaggctgaggcaggagaatcccttgaacctgggaggtgaaggttgcagtgagccaagatcacgccactacactctagcctgggtgacagagcaagactctgtctcaaaaaaaaaaaaatttcgtttttgttttgttttgttttgtttgttttttgagacggagtttcgctctgtagcacaggctggagtgcagtggtgcgatctcagctcactacaacctctgcctctcgggttcaagcaattctcctgcctcagcctcctgagtagctgggactacaggcacgtgccaccatgcccagctaatttttgtatttagtagagacggggtttcaccttgttggccaggatggtctccatctcttgacctcatgatctgcccaccttggcctcccaagtgttgggattacaggcatgagccaccaccatgcccggccaaaaaaaaattgttaatgagatatgttacattcttttttcatactatcttcaaattttaacttatggcatatctcaattccaactagtcacatttcaagtgctcaattgccagctatttgttaccctggttaaatagcacaggcctagattaaagctatgtctctgatggcattgattgactgaagccttagaaatggatgaggtcatctaggatggggttataaaatgagaagagagtcaaggtccaagtcctgagaagctctatcatttaaagcaggggtccccaacccccaggccatggaccagtacagcaggaggtgaggaacacgcgagcgagcaaagcttcatctgtatttacagttgctccccatcgcccacattactgcctgagctccatctcctgtcagatcagtggcagcattagattcttataggaccgcgaaccctattgtgaactgcacatatgtaggatcgggattgcgtgctccttgtgagaatctaatgccggatgatctgtcactgtctcccgttacccccgtatgggactgtctagttgcaggaaaacaagctcaggcctcctattgattctacattatggtgagttgtgtaattatttcattatgtattacaatgtaataaaaatagaaataaggtagttcacaataagtgtaatgcacttgaatcatcccaaaaccatttccccctcctcaccacctctgggtctgtggaaaaattgtcctccaagaaactggtccctggtgtcaaaaaggttggagaccactgatttaaagggtgaatagggaaagaattcctcctaaggcataatgataacattatttagtgctttgcagttataaatcatttccacatgcatttccattttttcttcccgtgaatactgtgaagaatagaaggttatccccattttttttttttttttttgagacggagttttgctcttgttgcccaggctggagcgcagtggcatgatctcggctcaccgcaatctctgcctcccaggttcaagcaattctcctgcctcagcctgctgagtagctaggattataggcacacgccaccacacccggctaatttttgtatttttactagagacggggtttctccatgttggtcaggctggtcttgaactcccgacctcagttgatctgcccgcctcggcctcccaaagtgctgggattacaggcatgagccatcgcacctggccatgcccattttatagataacaaaatcaaagccttagatgttctctcacccaaggcagagggggagctaaaactagaatccagttttctgatccaaagactaatgttctttccatttgtcttagtgagtttttccaaacagcacatcctattaacagaaattgcatgcaggatgtttattttgggaagtgattccaaggaaacaaggaagaagggaaagagagagttaggagcaaattaccacattgggccactgaggcttgatcctcccagggaccctctcaagagctgtggagagtgaactttagaattgtctgccctggggatttatcccctggttctcattatctgttggtcaagggttgctcccatctggtgttaagtccctgtcacttccaggtttgcacgtgtgtcagaggggtcatgtgggtaccacaggtgacaacttaggcagcaggagagaagctgctgggcagaaatagagagataaggagatactgctggggctggagtaaaaagttggccaagatgtaaaatggtcacaagaggtatctgaagtatcattgcacctcctgatttttgtggaggtgagggttcttcgtacaaataatttcaatataatagagatatattcatgcagagacagtgctatggaagcccagagaaagaagctgctaattgtgcctgtttacatggaggcttcacagagaaggtagccttggagctgagtcttaagtgctatggcttgaatgtttgatccctccaaaactcatgttgaaacttaatccccagtataatagtattaagaggcagggcctttaagaggtggtgggtcatgagggctctgacctcatgaatggattaatccattcatggataaatggattgagttatcacagggtgggttagttattattagagtaggtctgtattaaaagctagtttggctctcagtatgccccctttgccatgtgatgccctgtgccacctcgggactctgcagagagtccccaccagcaagaaggccctcctgagatgttgcctcttgaccttggacttcatagcttctagaactgtaagaaatacatttattttttaaataaattacccagtatcaagtattcagtgatagcaacagagaatggactaagacaaatggtaaggagttttctagaaagtgggataggacatgttccagacaaagattatatcatgtgttgaagagtgacagcttgaaatcatatgcaatccctggggaatcagcagctcagtatggttagattgttgaatatgggggcaggaaggagaggtggaagaggaggtccaagtctgagcttagtatttttggcttaaaagtgggcatctcatccattaaactgcagtggtgttcaagcttggatccatgttagaagcacctgaggagcttttcaaaaatatggctgggccccatctcaggtcaattaaatcatctttggaggttacagttaaataaaaatggttcaaaatattgtagatcaccgggcgtggtggctcactcctgtaatcccagcattttgggaggctgaggccggcagatcacttgaggtcaggagttcgacaccagcctggccaacatggtgaactgtctctactaaaaatacaaaaattagctgggcatgttgtcaggtacctgtaatcccagctactcgggaggctgaggcaggagaattgcttgaacccaggaggcagaggttgcagtgagctgagatcacgccactgtactccagcctgggcaacagagcgagactctgtctcaaaaaaaagaaaaaaaagcccagggactgatacgttctaaaatcttccatgtgattctaatgagtagttttgattgaagaccactgctttgaagggtttcatacaaggaagtgatgcccagatttgtgttcccaagattccttttggctggagagcagattagaggagagaccagttagcatgctcctgccatggtctaggcaaggcaggcgaggccagaattaaggcattgtctgtggggtaaggggaggggataatgtgaaagacacttgggttgaccagatctttgtgacaaaattcctttgaggaccttttaagattaagatggaacaggtaccttgggacggttaatgctgagagaaaactccgaatgcttctgtttaaagagggtggtggccacaagcctctgttggtgcaacttcatacatggaaagactttcagctgtcctgtactcacttcctctgatttgtcatccctgtcctcttgcagggatcattattctgcctgcctagagtacaacacaacatgggccatggactcacattgccttgggtttgaatcttcgctgtgctcttagggtcacaggagttaacctctctaagccttagtttctccacttgtatgatggaactgatgcttcttctcttgtaagattactgtgagaattcagtgggataaagtacatgcaaatatgagtccagagcagaaggcctggcccactgcagacactcagtgattgataactcatgtcttatcatttttgcagcttacctgccttagtgacaaattgacagttatctttattttattcccactgttccccatctgacttgcccttgtctagcccatttcaggtcagcccacccatgctgatgatccagtcttgtcatcttcctgcctgacctagtttgggttcagccctgctggggagatagtgccctcatgcctgggccacatgtggcataacacagcaagaactctttattgttctgaaatgtttacttgcccagctacctaaaaggttataagcacattgaggacagggaatggatttcatttgtctttgtttgcattttatttattcattgactccattcattcatttaacaaatagccattgaatatcaactctattgtaggccctggcatatattagtgagcaagatgggcaaatttattatacccttgttttgaacttatagtataatgagggagataatcattaatcaaataatcataaaataaatgttaaattacagccagcacaacatctgatttgggtagttgctccagagaagtttgctgactctgaatagagaaagcaccttgaacagataaaaccgttccctccttgtatgtgaagaacccaggaccaacctggtagccaggcagtgtcagtgagggaagcagacctctgcctcagagttctctagagatcctagttccccactcttaccctcagagccttctcagtttgaacctccagagtgcagggcctcagaagctacatgtgttagcaggcatcctggggtgttctcatgccactgaagtctgtgaaccactgcctgtgagacacaatgagaacttaaaaaaaaatagccttaatgaactgaagagtcattagctgtacccaagactccccctgggaaagtacctttgttctggtggacctaggtggggcggtagctttgacgtctgcttggttccccacttccttgtctactcgtaactgaacactggcagttagtggttgtcagatattcttttagcacaaacattccacattttggcacacactgagtctctgtcacacaagcaccagactgacccaatgccaaacaactagccttcattaaacgctgcctcttctgtgaatgcaggctcagggaccagaccactttgattttaatcccagatatgctactttctagccgagactttgggcaagaaattctctctatgcctccccttatatgtaaaatcaagatagtaacagtacctacttagaatatggttgtgagaattaaatggaataatacaagtgacttaattgtcagagcgatgagcacatcagaggtcctcaatggagactacctgctttaatgaagatatgtcctatggaaggcccttagctattagtgtattatggtcactgaaccagtactctgcaggatttccagcttctgttaaagggtaatgacctttcctcatgcatctgctttttcaaaatgaacaaaagtgctgttcttagataagcatttgtgattttatctttttatggagactttggaaagatttgctctgatttccaacctcgaatactcttggaaaatatctgtattatttttactctattggattttaatgtgtgttttagaaaacaacatctgcagatagatggtgttgcacaacaatgtgaatatccttaataccacaaaactgcacttaaaaatggttacaatggtaacttttatgttatgtgtgttttacagcaattaaaaaataagacaataacagaactgtggtttgtattaaagatctagtaactctaattaaagaaaaaggaaaggaagaaaatggtctctaaatgtttataggccctactagcatctctgtagctaatctggtttgtttatagagtactagagtcttactcaaaattataagctttgtttataaacccaagctcactgagacagactgatgaggctgctgaagttaccattaaagctacaggaacttttaagaaagtttttgaagacacactgtgtctgaagggaccatgaaaagttaatgatcatacttgcctgtgttaccagatgtcttagtctgttttgtgtggctgtaacagaatgtgacaaacttggtaatttataatataaagaacagaaattacttttctcacagttctggaggccaagaagcccaagatcaaggtgctggcaggcttggtgtctggtaagggcctggtctctgcttccaagatgatgccttgaactctgcatcctctggagggaggaatgctgttcctcacaatggcaaaagagtaggagatagcaaactcactccccaaaccccatttaattgtggcattaatccatttaagagggcagagtacttgaatacctaaatacctcccactagggctcacctcctgatgctgatgcattggtgatgaagttttcaacacatgagttttggaggggaaaacagtcaaaccacagcatctgtcttatgagctttttggggatggtgtaggacaactccagtggtactactttatattagacaatgaatattaacctcttttagggctggaaggaatttaggaaccatccagttccaaccccctcatttatccatttgattcaataatgatctgttgaattctttctctgtgcctaatgtatagtaggatataccatcgtggatgctgtatatactgtggtaaacaaagtagacctgccctcatgtagcttacaatctaataataaagatagatattaatcaaatagctgcataaatatgtaattacaccatgtggccagtaccgtctttagagggaaaatacaggcattctgatcaggagggtaggatctaaactcaggaggtcagagaaggctgagatgtcaagtgaagggctttctcggtaaaggccctggagcagaaaccatgagacctatgggcaactgcaagcaggccagttccaccagaggtgttttctgaatgagaagagggtgaaatattctacttctgtggagccaggaagcaggctgtctgatgctctagtttctctttctttctgcttctaaatagacttacccagaagcctggtactatgacatttgtgtaggtagaattgtttccatcctaaggagatatctgccccatatctatacggcctccagtctcagtgagcttagggtctgttgcgcctacatttccaggtcttcaccaaggcccctgcattggtgtttccatgaaccaagcaaggtcacttctactgttcctctttctggaccagcacttctatccatgcaacctagctcatgaagatcggttatgatcttcatgtgatcactgcactccagcctgggtgacagagcgagactccgtctcaaaaaaaaaaaaatttaaaaatttaatttatttttagactcatggggcacatgtgcatatttgtttcatgggtatattgcatgatgctgaggtttgggcttctaatgatcctgtcacccaagtagtgaacatagaacctgacaggtagtttttcaacctttgacctcctccccacctcccctcttttggaatccctagtgtttattgttcccgtctttgtgttcatgtgtacccaacgtttagcttccacttataagaatatgcagtatttggttttctgttcctgtgttaattcgcttagggtagtggcctccagctgcattcatgttgctgcaaaggacatgatttcattcttttttatggctgcatagtattccatggtgcatatgtaccacattttctttatacaattcatcattgatggacacctgggttgattctatgtctttgctattatgaatagtgctgtgataaatatacaagtgcaggtgtctttttggtggaataatttgttttcctttgggtatatacctagtaatgggattgctgggtcaaatggcaattctatttttagttctttgagaaatctctaaccttcttttcacagggctgaataaatttgcattcccaccaacagtgtgtaagcattctcttgtatgcacaatcttgccagcatctgttattttctgacttcttaatagccattctgactggtataagatggtatctcattgtggttttaacattcatctctctgatgaccagtgatgatgagcattttttcaaaagtgtattggccacttgtatgtcttctcttgagaagtgtctatttatgtctttgacccactttttgtgtgtttactctgtcactggttttttttgctgtgcagaagctctttagtttaattaggtcccaattgtcactttttgttttaactgcatttgcttttgaggacttagtcataaattctttcctgaggccaatgtctggaagggtatttcctaggtttcttttatgacttttatagtttgagggtcttacagttatgtgtttattctaccttgagttaatttttgtatattgtgagaggtaggggtgtagtttcatacttctacatatggttagccagttttccaaccaccatttattaaataggaagtccttttcccattgtttatttttgtcagctttgtcaaagatcagttggctgtaagtgtatggctttatttcagggtctctattctgttccattgatctatgtatctatttctgtaccagtaccatgctgttttagttatcatagctttgtggtttaaagttaggttatgtgatgcctctggctttatcctttttgcttaggattgccttgtctatttgggctcttttttggtctgtatgaattttagagtagatttttttctaattctttgatttctttgggcaatacgacgcattcaaaaaagacttggaaggaaataaataaaaataaaagtgatatctaattagtagaatcttaaacatctttttttacttcattttataagtgatatttaagaaacttttagtactcttaaaatagaaaataatattgaaataatcccgagggagtgtcagatctcttccttaccacctaaatcttactgctttctttaaaggatatactcatagggacttttggaaatatttaaatataagctacagagaaatgttgggtttctccactgccagactttgaggcattcactagctaatggacttttgagcccaggaggcagagagaacatgaacattctccagacttctgggaagctttatttactgaagcccctgtaggcctcgtactctctggaacatgcattggaaaatgctggtgtggtggaaagagaacaaaacgttgtggctacctgggctctgatggatgttgtaacaaagaaaggcaagctccccaaatgctcaaattgaactttcagtcaagctttatctgtctctcaagcagcaaacaatgccagttttttattctgcaagccattttagaagacaaaatgtttggcacagttgcacaggttagcatgctagtgtactgtgtacacaagatgaaatgtcttcaatttgtgttaaaatatgctttacccccttctcaaacacttgtcaaatgaaacgtagtaaaagtttttgtttctcaactacctcactgtgtaagtaaggccttagagaaaacaagctgacagaagcaagcctggttctttggctctatgggaagaatgactttcgtatcaacaatgttagaataaaatctgatcccagataaatgctgcttgctgcttctacctcaccagtttctgtcgtatgctgctgtggttggaacattttctggcaggaagaaatcaggggctctgttaggaaacaacagaattttctgccatgtgtaattcctgagcctctttctccactctgggaggtttctcaagggtccagtggccccagaccttagtcagtgttcctctctgcccacaatggccaccacctaagccatttcttggattcctttcactgcaagcctagctgcagaggagtctgtccagcttgcttccttgctgtgcccaaagccagcatacaggcccttttctttctaaaggcataatgctaattactggagggaatccccactgtgtgtaactaggaagagaacactgtggaggttatggcaggtcaagggtccttgcaaggtctgcacggtggtactccctggtctagtgaaatggagtagagtttgacactcaataggctctacttttagcttttcctagtggtccagggaggtctcttaaatcctatttcttgtcttcttttctccctggagtctcttagattcatagcagatgatatatatacccattgccacctacattttcaggtcttcactggggcccctacattggtgtctccatgaaccaaacaaggtcatttctactgttcctctttccagaccactgcttctgttcatgcaacctagcttatatatgtagggagattcacacacacacacacacacacacacaccacacacccacacacacccacacacacagctaaattaagcatttttaaagtggcagaccatactttgaggtctgcagcttaaataagcagccacgtgacaagcgtctccttcttctcttcctttcgcttccccatttacttccctctatgtttcttctctaaggaagatttaaaagcacatgtgccatcatgctcttctcccaagttcatatcagatgtcattaatcaatcatggaattttttaatcctgagtaagcccagagatataaccaaagatgactatcagttgatcaaaatgggcattgagcagtttactcctggatagatacccccaaagaaatgagagcttatttcaacaaaatgaaatgcatatgaatgtttctggcagctatatttccagtagccccaaactggaaataacccgaatgtccatcaacagttgaatggataaaaatatagtatatccatataatgaaatactttgcagtgatggaaaaagatgaactactgatacacacagtttgagttcatcttacatagtgtaaagtgaaagaagttagacataaaggaggcatactatgtgagttcatacattgcagttcaaaaacaggcagaactcatacatggtggtagaagttaagacagtggtaactgactgagaggggcactgggaagccttatgagggctagaatgtgttctgtatcttgatctgggtggtggttatatggatgtgcacatatgcaaaaatttattgaggtgtatgcctagtatttgcacactttactgtagctacccctcatttaatgtccttaaaagggggcaccaatttgaaaattattgcccagcccttgcttctatgtttctgtgtatagtttctgtttctagttctttctcctgctgtcatctgtccttcttctcctctgctgactttctttcctcctttttttcttcttttcatctccccctactcgtaaagctaaaaacatgaagtttaagtacatatattgtaaaatatattaaatacaattttacagttatattcataatttaaaagtgagtgtatttagtgtttttacacctctccttaaaacaaactctgcatttattgaactaaaattagatgaacatatttattacgtcttactggcattcaatggagtaactcagtggttcccaaacttatctgcacattagaatcatgtgggaccttataaaaattccaaagcccaggacacaataccacatcaattagatcacaatacctgggtctaggacacaagcatcagtagccattgaagctttccaggtgattcccgtatgattccaatgtgtagacaagtttggggactatagattaatggctttctattccttccatagtgtctcagctacttcagcatgtggttctgaatcttggctgcacattagaatcacctaagaagcttctaaacaatactgcttcttgggccctgttctgcataaggtctgaatatttctaacatgcaaacagcatgaagagccccgttctagcagggttgttgtcctggtagatcttgtgatcggagtgactccagtgccatcccctcaatgttcctctcaaatactttctcctcatgtttttgaaaattccagtcctttcttttgcaagcctaatatggagatgagtgatgtgatactgataagtttttggtctgtgttgctttcagtatgggattgtgctggatgcgggttcttctcacacaagtttatacatctataagtggccagcagaaaaggagaatgacacaggcgtggtgcatcaagtagaagaatgcagggttaaaggtaagatgaagaccaagggaaggggaggccaacagtggggcatgagaacatgagaggtgtatgaccagtagaacacaagagaaaaaggagtcccacgcataggaagccaagtgaagaaaacagtgcagctgctgttgttatgttatcgttacagaaaacatattgaaatcagtcgttaatgatcaaaacctaagaataaacacacataaatataattaatagtagctcccatcaacagaacacttctgcatgctatgtacttagtactgaacatgtgttacttcagtataccctcataatctccctttgaggtatgcattattatactaattttttaaaaatgagggcactgaggttgagagaggttataccacttgtttgttactcaagctagtaagtgatggagctgcggttcaaaccaagttctgcccgacttcaagtctgcatcttagccagtgcttctcaaacttgcatgagcttgttaaaaacacagatgatgggtcccatcccctagagtttctgagtcagcagatctggaatgaagcctgataatctgtatttctaagaagttcctaggtgatgctaatctgtctggttcagagatttattgctctcttaatctttgtaccctgatctacagcttggaagacatttttcaaagctttcagcttctgtgtaggcaggaaagaccaaattataggctcttagggctgggaaaaggaacttacagatcgtttaaattttgtttcacagagaaggaaacaaaaacctggaggattagtgccttgaaagtagcaacagaatagagacaagaatctaggtctcctaattacactctaggtttcctgctactctgagctgctgcattatatatcaataatttttttcttttaaggtcataatatgttagagtggttgacattcagctttcaatccctttacccagtaccctaccatgcaccattataccacagtctctctgacttttatctctcttagccttttgagctgggaacccactgtttatttttagtcagactgatagcctagatcctagaagataattgattttcagtttgacagcctgtggaatccactaattttcacaggtcgtcaagaaagtagtagagaggagatatttccaagagagcaagtcattctacccagtagccccatcaatactgacactttggccccatctgagacagtacttctggcctttcttaaagcccaaatccctcattttattggcttttatttgacacactgccttccatttttaaaagttattttaatggccaagcacggtggctcatgcctgtaatcccagcactttgggaggctgaggtgggcggatcacaaggtcaggagatggagaccatcctggctaacacggtgaaaccctgtatctactaaaaatacaaaaaaattagctaggcatggtggtgcgtgcctgtagtcccagctactagggtggctgaggcaggagaatcacttgaacccgggaggcggaggttgcagttagccgagatcgcgccactacactccagcctgggcgacagagcaagactccgtctcaaaaaaaaaaatctagcagatgtccttcttctgagacttatcccatgagcgtttggcctaacaatgaaggattcttccctctcaaaagagagagttctctagttaatcaaatatttaacaccaaattttctgaatcaaaacaattagctggtaacttagagctgattttctcatggttattaggctgtttgaaaacctgtgaatgatctggataacttatttgaataattatccttaaagcaattactctgctatgaagcactgatagtgtagatatttatcttaatgtgagatgaaagtgttgttataacttcaaaaagcttaaggaatcttggctctaatcctccatagcaacagtcggttttgctctaaaactggaaaaacagttttgctagggaggcaggatatcggagtggaaaagtcactgaagagacatagattctgttcctctttcttgtaacaggaagcaactccacctcagaaactttaaggtgctggccaggatcagataactagttagtggcagcttccatctttttagtaaaagccaatttgtctgacgcttaatttttattccaagtgttatctttaggtcttttaggaactagtgtcattaattacagtgttctggaggaaatatcaaaaagcagctaacagagtagctatctataatatccccattaaagtctgagaatgttatgcaattgaatatgaaattgcgccatccagtggcagaattattgaacactgaacagacccaacttaaagtctggaaattaaatcctctcaaggctaggtccagtgaattaccctctaagtacaataacctaatgtatagtacatcaggaaattgttttcttgtatttttttcaaaacaccatattttgatctactattgtcaaggtatgttttataatttttttttaaaagattgttatcttctacatcttttcctaggtcctggaatctcaaaatttgttcagaaagtaaatgaaataggcatttacctgactgattgcatggaaagagctagggaagtgattccaaggtcccagcaccaagagacacccgtttacctgggagccacggcaggcatgcggttgctcaggtatagcagcatgtagggaccaagagtatctgggagttaggcttggcagtgaaagagcctctgaagttatgggaaagggccacactccctaataccccaagttctacacacccaagtccatacttaagaaaggatattttagtaagtgaataaaatgttcaaactcttagtatatataggggtaggattttatgtatgttaaaaaaaaaagcccccttgtgcatctccctatgggggattcaaaggggaaggggcacagggagagaaagactgggcccgtatactctggggtttggggctacagatttaactattcaatatctgggaggaagaggataagaggagactcatagacatcccaggtcataaatattcacaactagcacatctttatatcacttgatacctgtgtgaattatttgttcacttgttcattcattcagcatatagtgcctgctctatccagaatatgaaaactcaaccctcaaggaaatcagtttcaatgcagggtgatcagtgttttaatagaggagtgctcagagctgctatgggagcacatttggccctgcccagggtgagaggaggtcaggaagacttagaggaagggatgcctgaactgaatcatgaaaaatgagttggaggatcggggaacagctttatcagcagaacagacagcatgcattcagtaactgatgtttattcagcacctattatatgtcaggcactgttctaagtactgaggatacaacagtgaacaggacaaagtctctgacttcatggagcttgtgttctaccggatgtgcaaaggtagggaagtgtgagaggcatattcagaggactgtaagtagttctgcatagatagaagataggtaagtagtgtaaaataataatgataataatagtagcagctcgtatttattgagcccttcctatgttcttagcactacgctaagcacttaattgcactgtcataacaactctatgaaattaacaattattaacaagataaggaagctgtggcttacaaatgttaagtaactcacccaaggtcacacacctgggaagtggtggagccaggattctgagtgggattctgaaaaggaagggtccaggtcacaaagtgccctatggggccatgctaggaagtttggagtttatcttagagatagtaggaagccattaaaggatgctacacaactggtgacactggtagagaagatggattggaggggagaaaagctggggataaaaggaaggcagttagtaggtgtggacgccatttagatgagagatgacaggggcctaatgccagctggaaggtagcatcctctcgctcagagactcccagtgttgggtagcctagatcttggaagcaattgcatcccatcttcattaagacaaccctggaagattccttctttaggtctcaaggtctcaaacagacccaagaactgagctgtaatatgaggaagatttttcccagtctggcagcagaggagattggatatctattccaggtcatttgccacctggtttctactagaaccctaattaaaaacctggagcagagtctggccatgtaaccagctaggagccacccacagtggttaatatagcacacatcagcttcaggtatggtcatcaaaccatacccagctatcaccaccacagtaattttaagagcctttgataactttttgagccagggaacttcagaacaaaagtggtattttaaggaaaaccaacctatgaaaggattggaaggatgtggatttggagagagatgaacaaaatattaattctgcctcatccaaaaaaggggtttcttggacagctatgtgcgaagatccccatctcttcatttattccagggcattatggttcacttcttagtagcactgtgtggatgctgtagctgaaatgggtaatgtaatataattattaaaacaaaaatgataacctcagctcttcctttgtacaggatggaaagtgaagagttggcagacagggttctggatgtggtggagaggagcctcagcaactacccctttgacttccagggtgccaggatcattactggccaagaggaaggtgcctatggctggattactatcaactatctgctgggcaaattcagtcaggtgaatatctcacggcatccatggaggtggctctctggaggccaatgccattgctatctcaggcagtacttgggtcgctagccagaatgaatgaatgaatgatagatggatggatggatggatgactggatgaatgaatttactctcacatttgtaagggtcaccagaggtataattctcttacaagaccttctactattgggagaataaggacatgtctttaccttagggaggcataaaggaaattaaaaatttatcattaaaaattagaatagctaacatttgccttctgctatgtgtctcccgctgtgctcagcacttttcatgttttctctgattttatccttagaacaacactatgaggtactacatcatccccattttagagccccatatcgatgcctagagagggtaattagtctgcccatggctgtacagctaacaagcgactgagtgagaatttgaacttgaatgtgtctggcctcagacctcttgtttttaaacaccagttacactgcttctatgtccggcagtctgagctatgtctttgaagcccctcttttcttgctgataatctgttgtagatcaggagcctctagtgagctttgcctcacctttatgcccctgtttctttgccttaggaaatccctgactccaatagatactatgaaaagcagggtgtccagagacttctagcactggtaactgtactgtctttcagaaaacaaggtggttcagcatagtcccatatgaaaccaataatcaggaaacctttggagctttggaccttgggggagcctctacacaagtcacttttgtaccccaaaaccagactatcgagtccccagataatgctctgcaatttcgcctctatggcaaggactacaatgtctacacacatagcttcttgtgctatgggaaggatcaggcactctggcagaaactggccaaggacattcaggcaagtataactcaatccagacctgcccccttcacatctgcacctccagcccccacatcctgttgttttctgtttcaaattcagtagtttgtctgaacttggttattgtactttccaaacctttttaggcaggatattgaactacatctggttgacccctataaattgtttcagtcagacatcccctcccatgtttgtttactgcgttatctccacagacacaactgagatcttctctcaggaaataatttctccccctcgtggggttgataatgaaaattatgtggtagaatattgtttgttggagggggaattgcaatttataagctcttttagaccactttttaaagctccctttcctacaaactacaaaaaaacagagttgttagaaatgacctggagaggagaaggaaaaaaaaaaaaacacttcaggagaaacacaaaatgtatcaattgacacttcaaatcttgtcatcttgtccccagatgccttctgcattttgaagacaagaaaagttaaacacactttgggaggctgaggtgggtggatcacttgaggtcaggagttggagaccagcctggccaacatggtgaaaccccatctctactaaaaatacaaaaaaagaaaaaaaattagctgggcatggtggcacatacctgtaatcccagctacttgggaggctgagaaaggagaatcacttgaactgggaggtggaggttgcagtgagccgagattgtgccactacactccagcctgggccacagagcgagactccatctcaaaaagaaaaaaaagaaaagaaaaagaaaaagaaaacaaaagttaaacatactcaacatcatgtgagtaccaggcacaccctgacaagcaaacacaaagccaggatgtcatatccagctgttccctgtctccactgaaaggataacaagttctctgctctcctccaaagcattctctctggttttcaaaaccactaccaataagatggtcctgggagtagggggcgctgagagacatccactgagcctcaaagctccactaaccttcttatccacagcagcctcctttcttccctagtaggttgtgggttagaaattacttttttttgggccaggcgtggtggctcacacctgtaatcccagcactttgggaggccgaggcgggtggatcacttgaggtccggagttcgagaccagcctgaccaacatggcgacaccccgtctctactaaaaatacaaaaaattagccgggtgtggtggcacacacctgtaattccagctactaaggagtctgaggcaggagaatcgcttgaacctgggaggctgaggttgcagtgagctgagattgcgccattttactccagcctgggcgacagagcaagactccatctcaaaaaaaaaaattatttttcttggataggagaatgcttgaagaagaaaaaaaatttttttaataatttttaaattatgtaggctcctggagaactactcccaggcccaaatttttgacaaccttgagagtttccttgtgaatttgctcctgacctagatgattaggactaagcactcagggacatttcaaactaatggcatttctgggcccagttttaactacatcagcattctttgactagccaaatacatttatatctgataccacttctggtgcctgttacacaaatccatttttcatatttattcctaagggtaaaaaggcagggcaggacatattgattccaataccaagtggtgggatgttgtacagtgcctacatattgattaagtcagactgtaccttttgtatccaaagcgttcacacatgatgctttcaagtgatttttccattcaggttgcaagtaatgaaattctcagggacccatgctttcatcctggatataagaaggtagtgaacgtaagtgacctttacaagaccccctgcaccaagagatttgagatgactcttccattccagcagtttgaaatccagggtattggaaactatcaacaatgccatcaaagcatcctggagctcttcaacaccagttactgcccttactcccagtgtgccttcaatgggattttcttgccaccactccagggggattttggggtaagtttgtgaaatgatgaggtataggatgtcttgtttacaagttatagaatatgtgcctacaaaagatttaaataataggatgcatttttctcttacataatgtcttgaggtagatgattaggggttggttcttcagctcaactatgtcagaacttgggatcagttttttccactatcgttgtgatctttttgtgctaaggtatgttactgctccaagcaccatatcactaggtcactgcctcctttttggctctaggcagcaccttaagcccaggttcatctcctttctagtcaacaataagagtactgcctttccggaatgggggaggtcccaaagaggttagccccagcagtgtgggaaaactgactagggggttgtgcccaggggaccttgtgggacagacctcctacagccatagaacagccactctgatttggcatctcctttggccaagtgacagagcagacttcccagggctggggatgctaaatctgcctcttccttgtctctgcctgtccccagggatatctcccttcaggatgtcacgatgcttactgtgggttaagacaaagacaggtttcctgctagggaacccaggatgatggggaagctgattgtccaccttgatctcactttttccagtgtacaaattgtgagtttgggggaaattttccacaagcttggtgtcaggcagaatcgggggagaggtgacatggatgtggaagtttgattatcttcccgtctgcttggagttttttcacttctttgtggccccaggaactgtctcatcttcatatttgatttctgggatattgctggtgataatctcagtgctgtacatttgtttctggttgtctgtggttggggggcatgaagccagcttgcttccatgccgccattttggaatcagacatccaagcatcatattttctttcacatgcaaagccaaagcaggaaagatgtttaaggttttccttgcacacatctcttgcacacacattttgcagaagtgccaactgacatcttttcagatcctgctggccagaacttggtgaaatatatactctaaaccaatctgtgataaagagaaatggattaatatagttagtttagactaattattgtttatcacctgaggagtcgtttttgaggatattgctttcctctacttgggtaaaatcaggacttcataagcgaggaagaagggggctagctatggggtatgtgcctgttagagtttgccataggtggcttctcaaatgttagaaggaggaggagcagcagttagatgacacagctgagggttttcctctataaagacatttaggaagtagaaactcaggaaatcccaaagaaacattgaagataacatcattgtcattatgttttgaagagttgggggattatttgaatcctagctccaaattccttattttcttaataactccagaataagataaaatatttgagcagaggcagaagagatggctcttaattgactcagtcttcaaatttcttattttggtcccagaggctgagcattattataatcatagtttagtagcatattgaaaaattagctaccatctgtcaaatgccaattattgactatgcactatatgtatattatctcatttattcattcaagatattcaaagaaacaaggcttttgcctgccttcatgctttctcccttttcagaaaacagatcagcatgtaagaagggaggttcagctcctcccctccaggaccccagcaagagagtttctcctaaggtcacctggcttggcccaagacaaagctctagaagagaacataggcactgtcgtaatcagatctgattctacttctggcttcttatgaactgtatgagctcttcattttcttggtctctgagaaaacaataggtaatgccatagatccagacttaccttaaccatggtccaaaccacagtctaccctcccctcaaggttcctgagggaaatacatgacaagacaatgactggcagagtaatatttggttattagttggctgcaaacccaaattcagaagaaactgaacctcacttgaatgccctgtggctgagctggcactggctcttcaccttggacttttttttgggccagggcccttgccttagattgaactccttgaagaggaaggagggtgccaccttggccaagggcctttttcattccagtcactgcgaggatgtaaatctaaagtcaatgaacatacccttgtgtcttgagtttgtaacttctcagaaagtttcacttcctgggaaacatggccaattcctgccttcaagcttgagcaaacctttcctccttaggggactgaaatttcttgcctttgaatgtgattcatccaaccaaagcagggagagataggggctggaaaagggtggaggagtcttgaactccccctggaggcttttctatttgatcccttagttcctcattgagattgttctcccagccttctgaacctcagtttggcagttcctgagactatcgcattgcctgcctctatgtaggatctttctcctctagatacagccctcagggtcaggactgtcctgtcccgatttctgcattggcagtttcattctgcttcagatttttgatgttttttgttttgttttgttttatgccctctgtaatgtatccctaagacctaaagtttttttgtctgtttcctcatctgtacaatggggacagtaatatctacctcattgatagttgtgagtcagacaagcagtgatggtctgggaaatgtccaacaaccaactctcggggaatggggagctgatttgtagcacttaccagtttccatggtgtaagtagttctaccacagcctatttcaagctatatcaacatatcaactggctcacaaaaatctggaaattttaagaatcagctcttgtgagtacataagaaagagtcagctccagcacaccactgtaaatagcaaaaagcgggcataccccagcaccacccttaaaaaggttaggtctttatcctagcagtcttcattctatgctgtccttcctgcagggagttcctgttatcgagtcctgcctcttgaagcatagctatgtgcaacacagaaatccagtttcattcccattctttccagaactagttagcctgggtgttctcaagccacagagaatttgttggggagggagtttttgccacagttgcattcagcactgatgatctgattcttagttggtaaatatggtattaaaaattgtcattgctttagtcagtctggctacactgtagccttggttgctaaacagaatccaatgttgtgggcaaattagaaacactaacaagaaagagggaacatctgtagggaattacttatgaggtaatttagaaattatttttaaagatcacattgtgctgtttatataaataagaaagggaagaaacaagttcaataggaaactggaattaaagaacattaaaaacacatttgtttacatatgtatacataaatgtgtgtatatttatatttatatttatttatatttatatttttgttggtacaaaagtaattgtggtttcagaccatgaattttatttttttaattttttttgaaaagtactaaatatataaatattcacaagttcaacaaaggagagaaaataacaccaataaaatccccaaaaacttaacaatacattaatctaggttggatgatcttttttttttaattatactttaagttctagggtacatgtacacaacatgcaggtttgttagatatgtatacatacgccatgttggtgtgctgcacccattaactcgtcatttacattaggtatatctcctaatgctatccctcccccctccccccaccccacgacagtccccggtgtgtgatgttccccttcctgtgtccatgtgttctcattgttcaattcccacctatgagtgagaacatgcagtgtttgtttttttgtccctgcgatagtttgctgagaatgatggtttccagctccatccatgtccctgcaaaggacatgaactcatcattttttatggctgcatagtattccatggtgtatatgtgccacattttcttaatccagtctatcattgattgacatttgggttggttccaagtctttgctattgtgaatagtgccgcagtaaacatacgtgtgcatgtgtctttatagcagcatgatttataatcctttgggtatatacccagtaatgggatggctgggtcaaatggtatttctagttctagatccttgaggaatcgccacactgtcttccataatggttgaactagtttacagtcccaccaacagtgtaaaagtgttcctatttctccacatcctctccagcacctgtcgtttcctgactttttaatgattgccattctaactggtgtgagatggtatctcattgtggttttgatttgcatttctctgatggccagtgatgatgagcattttttcatgtatctgttggctgcaaaaatgtcttcttttgagaagtgtctattcaggtccttcgcccactttgtgatggggttgtttgtttttttcttgtaaatttgtttgagttcattttagattctggatattagccctttgtcagatgattaggttgcaaaaattttctcccattctgtaggttgcctgttcactctgatggtagtttcttttgctgtgcagaagctctttagtttaattagatcccatttgtcaattttggcttttgttgccattgcttttggtgtattagacatgaagtctttgcccatgcccatgtcctgaatagtattgcctaggttttcttctagggtttttatggttttgggtctaacatgtaagtctttaatccatcttgaattaatttttgtctaaggtgtaaggaagggatccagtttcagctttctacgtatggctagccagttttcccagcaccatttattaaatagggaatcctttccccattgtttgtttttgtcaggtttgtcaaagatcggatagttgtagatatgtggcattatttctgagggctctgttctgttccattggtctgtatctctgttttggtaccagtatcatgctgttttggttactgtagccttgtagtatagtttgaagtcaggtagcgtgatgccttcagctttgttcttttggcttaggattgacttggcaatgcaggctcttttttggttccatatgaactttaaagtatttttttccaattctgtgaagaaagttattggtagcttgatggggatggcattgaatctataaattaccttgggcagtatggccattttcatgacattgattcttcctacccatgagcatgaaatgttcttccatttgtttgtatcctcttttatttcattgagcagtggtttgtagttctccttgaagaggtccttcacatcccttgtaagttggactcccaggtattttattctctttgaagcaattgtgaatgggagttcactcataatttggctctctgtttgtctgttattggtgtataagaacgcttgtggtttttgcacattgattttgtatcctgagactttgctgaagttgtttatcagcttaaggagattttgggctgagatgatggggttttctagacatacaatcatgtcatctgcaaacagggacaatttgacttcctcttttcctaattgaatgccctttatttccttctcctgcctgattgccctggccagaacttccaacactatgttgaataggagtggtgagagagggtagccctgtcttgtgccagttttcaaagggaatgcttccagtttttgcccattcagtatgatattggctgtgggtttgtcatagatagctcttattattttgagatatgtcccatcattacctaatttattgagagtttttagcatgaagagttgttgaattttgtcaaaggccttttctgcatctattgagataatcatgtggcttttgtctttggttctgtttatatgctggattacgtttattgattttcgtatgttgatccagccttccatcccagggatgaagcccacttcatcatggtggataagctttttgatgtgctgctggattcggtttgccagtattttattaaggatttttgcatcaatgttcatcaaggatattggtctaaaattctctttttttgttgtgtctctgccaagctttggtatcaggatgatgctggcctcataaaatgagttagggcagattccctctttttctattgattggaatagtttcagaaggaatggtaccagcttctccttgtatctctggtagaattcggctgtgaatccatctggtcctggactttttttggttggtaagctattaattattgcctcaatttcagagcctgttattggtctattcagagattcaacttcttcctcgtttagtcttgggagggtgtgtgtgtcgaggaatttatctatttcttctagattttctagtttatttgcatagaggtgtttatagtattctctgatggtagtttgtatttctgtgggatcggtggtgatatcccctttaccattttttattgcatctgtttgattcttccctgttttcttctttattagtcttgctagcagtctatcaattttgttgatcttttcaaaaaaccagctcctggattcactgatttgttgaagggctttttgtgtctctatttccttcagttctgctgtgatcttagttatttcttgccttctgctagcttttgaatatgtttgctcttgcttctctagttcttttaattgtgatgttaggttgtcaattttagatctttcctgctttctcttgtgggcatttagtgccataaatttccctctacatactgctttgaatgtgtcccagagattctggtatgttgtgtctttgttctcgttggtttcaaagaacatctttatttctgccttcatttcgttacgtacccagtagtcattcaggagcaggttgttcagtttccatgtagttgagcagttttgtgtgagtttcttaatcctgagttctagtttgattgcactgtggtctgagagacagtttgttataatttctgttcttttacatttgctgaggagtgctttacttccaactatgtggtcaattttggaataagtgtggtgtggcgctgaaaagaatgtatattctgttgattaggggtggagagttctgtagatgtctatctattaggtccacttggtgcagagctgagttcaattcctggatatccttgttaactttctgtctcattgatctgtctaatgttgacagtggggtgttaaagtctcccattattattgtgtgggagtctaagtctctttgtgggtcactaaggacttgctttatgaatttgggtgctcctgtattgggtgcatatatatttaggatagttagctcttcttgttgaattgatccctttaccattatgtaatggccttctttgtctcttttgatctttgttggtttaaagtctgttttatctgagactaggattgcaacccctgcctttttttgttttctatttgcttgatagatcttcctccatccctttatttaagcctatgtgtgtctctgcacacgagatgggtttcctgaatacagcacactgatgggtcttgactctttatccaatttgccagtctgtgtcttttaattggagcatttagcccatttacatttaaggttaatattgttatgtgtgaatttgatcctgtcattatgatgttagctggttattttgctcgttagttgatgctgtttcttcctagccttgatggtctttacaatttggcatgtttttgcagtggctggtaccagttgttcctttccatgtttagtgcttccttcaggagctcttttagggcaggcctggtggtgacagaatctctcagtgtttgcttgtctgtaaagtattttatttctccttcacttatgaagcttaggttggctggacatgaaattctgggttgaaaattcttttctttaagaatgttgaatattggctaccactctcttctggcttatagagtttctgccaaaaggtctgctgttagtctgatgggcttccctttgtgggtaacccgacctttctctctggctgcccttaacattttttccttcatttcaactttggtgaatctgataattatgtgtcttggagttgctcttctcgaggagtatctttgtggcgttctctgtatttccttaatttgaatgttggcttgccttgctagattggggaagttctcctggataatatcccgcagagtgttttccaacttggttccattctccccgtcactttcaggtacaccaatcagacgtagatttggtcttttcacataatcccatatttctgggaggctttgtccgtttctctttattcttttttctctaaacttcccttctcacttcaattcattcatttcgctagaccattcttaaaagaagatatacaaatggccaacaaacatgaaaaaatgctcaacatcactaattatcagggaaatgcaaattaaaaccacagtgagacactaccttactctcctgcaagaatggtcataatttaaaaatcaaaaaataatagatgttggcatggatgtggtgtaaagggaacacttttgcactgctggtgggaatgtaaaccagtacaaccactatggaaaacagtatagagactccttaaggaactaaaagtagaactactgtttgatccagcaatcccactactggatatctacccagaggaaaataagtcattgtatgaaaaagacacttgcacacacatgttcacagcaacacaattcgcagttgcaaaaatatggaaccagtccaaatgcccatcaatcaacaagtggacaaagaaaatgtggtaaatatatatatgtatgcatatatatatatatatatatacacacacataaatgtatatacacacactatggaatactactcagccataaaaaggaatgaaatcatggcatttgcagcaaggacacatgatgtattaagtaaaacaaagcagtattataaaaaatttgtctagtatcatcatatttaggttatatatatacatatacacatatataattatataaatatgtattcactattttctattacatatctatttgctatagatattaaacagtaaattgttaaaaagtgtacatctctagaggatggttagattaaggagggacttccatttttaacttgtattatttaaattctatataataaacgtgtttttttttaataagccagcattttaaagacatttctattttgaaggaaaagaaatgaatagggaaacttcatgttttgagaaataaataagagcaagattctgagatgccagagggaggcttctgaaggtcatgggaaatttttcaagagccgatggcatgtagtgtcttggggggttggaggtggcatggaccaggaggccctgctgacttgatcgctatgtatcctactgaaggctcaatatgttgctaaatctacctcatagaaatttgttgtttgttgatctgttttttataatttgtacttactttataaagcaaatgtcactacttagcaaaagcaagagagtttctagatgcttacctcattgagacttttgctaatagaataagctctaggattaatttcagaaagtcttttgaaatgtaacaatttaaggaaatatttattagtgctttattacatgctcattataaaaaaactgtacaaaaagcttaaagtaaagactaaaaggtctcttctccctctcaccccaccatcagttcactagaggaaaaatgaggaatagttgtaataaacaggaagaacttttccaggcattagctatgcgaatccaagcatatataaatttatccagatttaacagagattgttgtgccttaggaactagagagagagcagttttctgccacttatttacggagcactcacatatgccaagtgccatgttagtgagggcagattcaaccaagaacaagggaaattccgcgcctgccatcacagagttggcattctagaaagcaggcagacatgagaccagaaacacaaacaaaggcaaatccgactgctgcaaatcaaaaggaactgctggggcaggtcgcggtggcttacgcctgtaatcccagcactttgggaggccgacgcgggcggatcacgaggttaggagattgagaccatcctggctaatgcggtgaaaccccgtctctactaaaaatacaaattagccgggcgtggtggcaggcgcctgtaatcccagctactcgggaggctgaggcaggagaatggcgtgaacccggacgcagagcttgcagtgagccgagatcgcgccactgcactccagcctgggcgacagagcaagactccatctcaaaaaaaaaaaaaaaagtaactgctgggaggaaagagacagtcctgtgaaagcagataacagagggtcctagagacccctctaaggaggggaagtggaagtccagggaattccagcagagggaatagcaagtgtacaggttctaggggaggaaaggcttggcggggattgaaagccagggtgctgggtatggtgggcatgggggcagggctagaacatgcctggttttcagcgaccttgtaggatttgatttttattctaagtataattaggagccaccaaaggttttaagcaggggagtgatatgatcagatttgtttttaaaagattcctgtgactgctgtttgtaggatgggttggactagaaccagaaagctaatgtggagactaattaagaggccattgcagtatccacacgagatgatagtggcttgggttaagagggcagaaataggaccataccacgatctttttctgcacctgggatacaatgataatggaagtgctggaattcctgagttcagggcatatggaggctctccagtttctgcagagctcgacttcctagaggaatgagcataccagttcagaggctaaatgtatttataccattgctcataggggaaattgctggaaatcaggagaatatctaccagtagagagttgttgaataaattaagatacatctacaccgtagactcttatgtggccattagagtggccccagctgacttggagggatttctataaaggattgttaagaaaagcaagatgaagaatctgtttaaaatttcatttctaaaacaaaccctttatatgtgtgtgtttgtatatgattataggagcatgggaaaaatggaaggcttcatattaagttgttagtatgaactcctgttgggactgaaagtggaagaaaaaaatcaagccaaaaaaaggaaaatttattaaaaaggactaatatgctcacacttatgttattagatatatatgtataagaatattgaaaaatgcaacttttaagaagctggcactgggtttatgtcaattggaactgaggcatacggcctgtttgcagcaggaaattgcctggtggaggatatttttcctcatctctgagtcacagtgagcccccaatgggatctctgctacctcctgtttctttgcctaccaaaactctgtttctttgcctatgcgaattacactttgggaatcacatttgctttctacattcacttctagttaagtaattttacagaaggcaaattataatccccaatctaaccgtgtttgccacagggaaaactttatgcccccctcaaataatctcagtaaactatgactcagcacagtgtctagcaaacagagctcagtgtgtttgctgaatgaacaaatgatgtgctcctttaatatccaacatgatttccccctaaaaactggcacctttttgggtaggaaagaggaaaagcactggagttggggtttgaattgcctcatctagcaagctctgctcaattattttttcccctttaaattatgctctattaaaagagtaaaaaggcagttatagggtggtatgaagtataataaacattttatatgtatcatagaatgagaaagatgctagaagcctatatactatattgaatagcagttgtcactaagtagtagaatttagaggtcattttaatagaatttttttttgttttactgatttgaacttttaactttttttatagttcttatgtttgatgatgataatgatttttaaaaaatttcagttgtgtctaaaatagtacctagcccatagtagacctgtaataaatatttgttgaataaagatggattttttaaaggaaagcagtacatattcattatagaaaataggcaaaaaataagcacaaggggaaaaaaccaatttcgctactcagagataactcaatagtgttgtatagaattttccagttgtttatatttattaaacattcatatgtagtacatagtatttttaaatgggatttttgcaacccctttctctctcttttcttattctctttccccatttttctttctccctgactcttctattacaattatggagaaaagtaactgccaggtggcttagaaatgtgtgtcagcagcaaagtggctcctcttccaggaaggaaacagctcttgggcctgcaatatcactttgtgtgttaatttactcagcagaactttccaggcacctgcacaagggatgcggcctttaggagagcaagttggcatccctctgtgtggaacacagcctaaaactgcgattttctcttgtaggcattttcagctttttactttgtgatgaagtttttaaacttgacatcagagaaagtctctcaggaaaaggtgactgagatgatgaaaaagttctgtgctcagccttgggaggaggtaagtgactaggcacagcagctctaacagcatgagtgccctgtgtcgttgctgatgcagaggatgtgagtctgctctgaaactcctgctggtttgaccaagatccagcaaatgtgttagagaagaccagatggtggactcaggaatgaatttatcagcattccttgataacttgacatccagtggcttaaataagatcttatttttttctcacctaatacaaagtctggcagtaggcagctgctggcatggggtcagcagctctgctctatctcagccattgcttcttcagctctgctgttgtgcctgtttcttcatggacacaagatggtggctgtggcttcaggcatcacagccatgttcagaaaggtcagaaaaggggtcgaaccagatacatctgttcctttttacaggaaagcaaaagctatcccagactcagcagtcttccccttatatctcaatggccaggattgactgggaaaaccaggtgcagaattttgtgaccagcttagagcttagacctataatgagccactgcctcgagctgggcacattgtggcccactctcctccttcagtccccaaatcagagttctgttagcaagaaagcaggcaatttgcagagtctgacacagacacaattgtggtaaaatcctctccatttcccaggtccaagatatctcctacttattcataaacttgaagcacaatttttttcttatcagaggcactgagccattcaacatccagtgccacaagatgaaaatccagggatgagaggtatggaatccactccgattataaaagacatagctcaaaacagcagctgtacttaagttgacagttgcaaaagtgaatggtgttttcattcttaagaaatactattaattaaaaatagatgcttatccctgactgcactgacaagggggaagaaaggctgagcaagagcctggaagcttgccattctctccaggtattttgtctagaacatgaaagaaatgtggtcagggccttcatcaagagttgctcaaatatgtctcagcattttacaaaatgcttagcggtggttttttgcatctggcggtgatctgtggaggaagataagcatgttagagtggaggcaatttgagaccaggcctacatgtggctgctgaggaagcagatttaggctgctctttgaaaaaaaattacttctggtttagattaaaagttctcatcctggctaacatggtgaaaccccgtctctactaaaaatacaaaaaaaattagccgggcatggtggtgggcacctgtagtcccagctacttgggaggctgaagcaggagaatggcatgaacccaggaggcggagcttgcagtgagctgagattgtgccactgcactccagcctgggtgacagagcaggactccatctcaaaaattaaaaaaaaaaaaaaagttctgtcaggtttcctctcttatccacatctcatgttttacttcataagactatgttaggctgggaatgcttatatttagacctgtagttctgctcaggtaagtcatgtggggagttgttcagaggccctggaagtaagctaagaagggcctgcatttgggagaattcctgaagcatttggggaaggggttgcagggttagacccctgtcttcacccagagcctacagcattgaggtggatgttatgacccagggttcactttcccaagctgcatcgtccacccaggtagaaagcatagttttgtcaagtacattgttagaaggtgactctttcttctttccctcctaacttcatcatggactgctactccagtatggcttgtgtttgggaatgttcctcctaaacacctttggtagagagataattaacaatgtttaagcatgtactatgtgttgacagtggtggacatttgcttgctgtgctttatgcatatcctatcatgctgccttcccctgctttggcaagggaaataaaatgcaaaccacacctgctgacactcagtcaggtacctgaagccattgggtctctgaagtggagggaccaggagagtgagtggaagggagactccatggttgtcttctggcagcttcattagagggctagtagaatctttcagcagccagaacacagccaattttctactctgaaaatctggtcatccaagatctggtcagcccaagtgaacaatgtgatcagattctatgtgtactgatgaccagttatatttcagtgtactctggatcctcacattcagcctcatgaatatttagcctttctagggaaaggcatcccattcttgaagatccatcaatgcccctttatgtggagggcagaaagaggatatccatgaagagaaaagaacctcatcatgttccactgccctgggaatagaaaggagagaagagagaggggaaggtgggagagagaggagagaggagagtagacttcccctcccaatttggagagcacatagtgatccacccacaggcatgagcatgatcaattctggattgatgaagaaggtggatgcctttttggcttctatatttttggctactatcataaccttcaggaggccagactgcatagccaatgtacagatttccagaaggaggaggggaataggagtattaaagaattcagggaaattaggccaaaatggcatctcccagccccccacaagggataggccagccttcaaggacctacaggggctcagcactttcaagttggacctaagtagattcttgggattttgtgtcccataggcatccttcaattgacaggcccaagactacttcaataggggaggaggtcttttcacaaagggaaagcagaatgcagtgactgaaaggaaggggtaggaacctggacaggcaatgccaactgatgtccacaccaaggtctcaagaggatgtcacatgcagaggaatcaatcaaaggataatttccagaactgtgctgaaaagacaagctccaagctgggtcattctgagaatttcatcagagcaagacaaggcagtctagttatggacttatccttccagaaactggggacaggcaagaaccaagtgagaaacagaccccagccagcggttaggatttgcatatgggttaggacccacggaagggagagaaatctgggaaaagaggggtgtggtttaggcatcaaggagatactacatataaaacatctggcatagttccagatggtacatgatgcatgcataacaaatgttctctctctgccgagggtatccaggagggaatgcctatctgaagggctgaggaatggggcagcagacagaagtccaggctgaactagagaggtcctggcctgttgtcctcaaattgagggcaggagagttgcagagcaggctgtgggtatctgggtgtatattcacaacagctaggctaggtaagggcaagggatggcaagcagctcttaatatttttagtagggagtaggatgagtaaacataggaaggactcaaggaaacaaccactttgcatgactcagatgcaaaaaaagacattaagacagaagatagaaggtgagatgttggcagtgctagcagtcctcagcaaaatgctgcctaaactgtgtccacagctgtgtttctcaaactttactgtgcacgtgaatcacctgggaatcatattgggatgcagattctgaattggtagttttaaggtgaggactaaccagctcccaagtgatgctgatgctgccagtccagggactaaagtgagtggtaaggctttttatggctgtgggccaaaggctctggtcaagagcatatagaaaactcagattaaacaaagtctagggcatgaacagaggtactgaaatttagtgtttcagaacctactagaccacaggaactacttttttcctggaggacctgttattatctcatagaagcctgtgcaggaaaagcttccttaagagaccctaaactataaaaccctgctcccactgaaggagtgcagcaccacccccaaaaccctctggaagaggccaaccttcaggtgcactggagctggggctttcccctctcttcatcagggctagtagagaaaaagagggccacagagaggtgcctatcatacgagtatgatctccccctcacttcacttctagataaaaacatcttacgctggagtaaaggagaagtacctgagtgaatactgcttttctggtacctacattctctccctccttctgcaaggctatcatttcacagctgattcctgggagcacatccatttcattggcaaggtaatttgggggcctgttgggctggggggaggttggggttcggtggtagtgactgaagcagtttggggcttgaaaaaggggggagtcagcatggtgtagctttggcttgatgtcctgttctgccattctgcttcaaaccctggcattctgtgtcaagccctcctgggtctgttggcccactgtgagcatcctcgctaaggacagctacttgcattttcagttgcaccttcccacataacagtgactaattccttacaaaacaaaacacaaaacgagatatattaaagtaacagcatttcagcagctacagtgactctgtgtgctgacttcagcagccctctgaaaggccccttccataagctgggaaagtatgatcatggtttcatcatccttgttggttattacttcaaggttgaccaatctgaaagctctgtgtgaagaaggggactgagtggctgtgaatgatgagaccgttgtttagaagccaggcttagcctgagtccggaagaagcaacctcaatgctgtgctttaccatagcaccacctgcaggtatccaggaatagagaacccagctgagcgactcatgcttgaccaaaaatacccagagcagtgtgtctctacctttttaagcccatgctcactagtggggaaaacattttaccccctgtattaaatatggtgatttcaagcaaaacaaagcattgagacagagggctgtagcaggcctgaggataacagtgtccttacactcttgtcagtgctgatcttgctaattcaaacttaaatcttttccttgttataatattccagacttcctttaattccagcagtttattttgtttgaaagattatacctatgtcaaatttaggactgacacacgaggtagtcatgatgtatgtgtgtgtatatactttttttttaagagacatggtctcacgctgtcacccaggctggagtgcagtggtatgatcacagctcactgaagcctcaaactcctgggattaaatgatcctccccacccaggctcccaaatagctgagactacagacatgttccaccgtgcccagctaattttattttttagagagacagggtctcactatgttgcccaggctagtctcaaactcctggcctcaagtgatcctccctccttggcctcccaaagtgctgagattacaggcatgagccactgtgcccagccagtgatttatattgtttgaactcttccaatgcatgatccaataattctaagccctaggtgataactcttctaactcctccaaccacaaacagactttccccactgtttgcagatccagggcagcgacgccggctggactttgggctacatgctgaacctgaccaacatgatcccagctgagcaaccattgtccacacctctctcccactccacctatgtcttcctcatggttctattctccctggtccttttcacagtggccatcataggcttgcttatctttcacaagccttcatatttctggaaagatatggtatagcaaaagcagctgaaatatgctggctggagtgaggaaaaaaatcgtccagggagcattttcctccatcgcagtgttcaaggccatccttccctgtctgccagggccagtcttgacgagtgtgaagcttccttggcttttactgaagcctttcttttggaggtattcaatatcctttgcctcaaggacttcggcagatactgtctctttcatgagtttttcccagctacacctttctcctttgtactttgtgcttgtataggttttaaagacctgacacctttcataatctttgctttataaaagaacaatattgactttgtctagaagaactgagagtcttgagtcctgtgataggaggctgagctggctgaaagaagaatctcaggaactggttcagttgtactctttaagaacccctttctctctcctgtttgccatccattaagaaagccatatgatgcctttggagaaggcagacacacattccattcccagcctgctctgtgggtaggagaattttctacagtaggcaaatatgtgctaaagccaaagagttttataaggaaatatatgtgctcatgcagtcaatacagttctcaatcccacccaaagcaggtatgtcaataaatcacatattcctaggtgatacccaaatgctacagagtggaacactcagacctgagatttgcaaaaagcagatgtaaatatatgcattcaaacatcagggcttactatgaggtaggtggtatatacatgtcacaaataaaaatacagttacaactcagggtcacaaaaaatgcatcttccaatgcatatttttattatggtaaaatatacataaatataattcaccattttaacatttaattcatattaaatacgtacaaatcagtgacatttagtacattcacagtgttgtgccaccatcaccactatttagttccagaacatttgcatcatcaatacattgtctagagacaagactatcctgggtaggcagaaaccatagatcttttgtgtttacagctatggaaaccaactgtaccataaagatagttcactgagttttaaagccaagccacatcttatttttccaaggtttaatttagtgagagggcagcattagtgtggagtggcatgcttttgccctatcgtggaatttacacatcagaatgtgcaggatccaagtctgaaagtgttgccacccgtcacacaacatgggctttgtttgcttattccatgaagcagcagctatagaccttaccatggaaacatgaagagaccctgcacccctttccttaaggattgctgcaagagttacctgttgagcaggattgactggtgatgtttcattctgaccttgtcccaagctctccat

SEQ ID NO: 55 - DNA, 1488 bp, Homo sapiens
ggcggtaggagttcggcggaccgagaggttccgcgcccacttcgcggcccagaggactgagcccggcctccggtgcaaggaaaccccagaggccggaactagaattgcaaattttttttcaccccggattccaacggcattctgttataagcaacagagaatgaacgaagacagaaaattggaaccaagaagtgggattttgctgatgacaaatacctgaaaatggggaagcagctttggaactaggttctcactctgttacccagactggagtgcagtgacacgattacagctcattacagcctcaatctcccaggctcaagtgatcttcccacctcagcctcctgagtagctgggactgcaggtacaaaattcagtaggacacgactttctgagtcatatgctggatttgaggagatactgaagccacaagactgaaataacttttaaactgtgggtgatttggctaaaagctactctcatctattatatattcatcttactagttttgctctcagaggaagttcctgtttccaaggacaatgatttaaggcattgaagtggaactgagacacttggatcaaatccctgttctgccacgtgcaagagtctaacgtgaagacattttgctccaagaatatcctagccatccttggcttctcctctatcatagctgtgatagctttgcttgctgtggggttgacccagaacaaagcattgccagaaaacgttaagtatgggattgtgctggatgcgggttcttctcacacaagtttatacatctataagtggccagcagaaaaggagaatgacacaggcgtggtgcatcaagtagaagaatgcagggttaaaggtcctggaatctcaaaatttgttcagaaagtaaatgaaataggcatttacctgactgattgcatggaaagagctagggaagtgattccaaggtcccagcaccaagagacacccgtttacctgggagccacggcaggcatgcggttgctcaggatggaaagtgaagagttggcagacagggttctggatgtggtggagaggagcctcagcaactacccctttgacttccagggtgccaggatcattactggccaagaggaaggtgcctatggctggattactatcaactatctgctgggcaaattcagtcagaaaacaaggtggttcagcatagtcccatatgaaaccaataatcaggaaacctttggagctttggaccttgggggagcctctacacaagtcacttttgtaccccaaaaccagactatcgagtccccagataatgctctgcaatttcgcctctatggcaaggactacaatgtctacacacatagcttcttgtgctatgggaaggatcaggcactctggcagaaactggccaaggacattcaggcaagtataactcaatccagacctgcccccttcacatctgcacctccagcccccacatcctgttgttttctgtttcaaattcag

SEQ ID NO: 56 - protein, 191 aa, Homo sapiens
MERAREVIPRSQHQETPVYLGATAGMRLLRMESEELADRVLDVVERSLSNYPFDFQGARIITGQEEGAYGWITINYLLGKFSQKTRWFSIVPYETNNQETFGALDLGGASTQVTFVPQNQTIESPDNALQFRLYGKDYNVYTHSFLCYGKDQALWQKLAKDIQASITQSRPAPFTSAPPAPTSCCFLFQIQ

SEQ ID NO: 57 - DNA, 3502 bp, Homo sapiens
ggcggtaggagttcggcggaccgagaggttccgcgcccacttcgcggcccagaggactgagcccggcctccggtgcaaggaaaccccagaggccggaactagaattgcaaattttttttcaccccggattccaacggcattctgttataagcaacagagaatgaacgaagacagaaaattggaaccaagaagtgggattttgctgatgacaaatacctgaaaatggggaagcagctttggaactaggttctcactctgttacccagactggagtgcagtgacacgattacagctcattacagcctcaatctcccaggctcaagtgatcttcccacctcagcctcctgagtagctgggactgcaggtacaaaattcagtaggacacgactttctgagtcatatgctggatttgaggagatactgaagccacaagactgaaataacttttaaactgtgggtgatttggctaaaagctactctcatctattatatattcatcttactagttttgctctcagaggaagttcctgtttccaaggacaatgatttaaggcattgaagtggaactgagacacttggatcaaatccctgttctgccacgtgcaagagtctaacgtgaagacattttgctccaagaatatcctagccatccttggcttctcctctatcatagctgtgatagctttgcttgctgtggggttgacccagaacaaagcattgccagaaaacgttaagtatgggattgtgctggatgcgggttcttctcacacaagtttatacatctataagtggccagcagaaaaggagaatgacacaggcgtggtgcatcaagtagaagaatgcagggttaaaggtcctggaatctcaaaatttgttcagaaagtaaatgaaataggcatttacctgactgattgcatggaaagagctagggaagtgattccaaggtcccagcaccaagagacacccgtttacctgggagccacggcaggcatgcggttgctcaggatggaaagtgaagagttggcagacagggttctggatgtggtggagaggagcctcagcaactacccctttgacttccagggtgccaggatcattactggccaagaggaaggtgcctatggctggattactatcaactatctgctgggcaaattcagtcagaaaacaaggtggttcagcatagtcccatatgaaaccaataatcaggaaacctttggagctttggaccttgggggagcctctacacaagtcacttttgtaccccaaaaccagactatcgagtccccagataatgctctgcaatttcgcctctatggcaaggactacaatgtctacacacatagcttcttgtgctatgggaaggatcaggcactctggcagaaactggccaaggacattcaggttgcaagtaatgaaattctcagggacccatgctttcatcctggatataagaaggtagtgaacgtaagtgacctttacaagaccccctgcaccaagagatttgagatgactcttccattccagcagtttgaaatccagggtattggaaactatcaacaatgccatcaaagcatcctggagctcttcaacaccagttactgcccttactcccagtgtgccttcaatgggattttcttgccaccactccagggggattttggggcattttcagctttttactttgtgatgaagtttttaaacttgacatcagagaaagtctctcaggaaaaggtgactgagatgatgaaaaagttctgtgctcagccttgggaggagataaaaacatcttacgctggagtaaaggagaagtacctgagtgaatactgcttttctggtacctacattctctccctccttctgcaaggctatcatttcacagctgattcctgggagcacatccatttcattggcaagatccagggcagcgacgccggctggactttgggctacatgctgaacctgaccaacatgatcccagctgagcaaccattgtccacacctctctcccactccacctatgtcttcctcatggttctattctccctggtccttttcacagtggccatcataggcttgcttatctttcacaagccttcatatttctggaaagatatggtatagcaaaagcagctgaaatatgctggctggagtgaggaaaaaaatcgtccagggagcattttcctccatcgcagtgttcaaggccatccttccctgtctgccagggccagtcttgacgagtgtgaagcttccttggcttttactgaagcctttcttttggaggtattcaatatcctttgcctcaaggacttcggcagatactgtctctttcatgagtttttcccagctacacctttctcctttgtactttgtgcttgtataggttttaaagacctgacacctttcataatctttgctttataaaagaacaatattgactttgtctagaagaactgagagtcttgagtcctgtgataggaggctgagctggctgaaagaagaatctcaggaactggttcagttgtactctttaagaacccctttctctctcctgtttgccatccattaagaaagccatatgatgcctttggagaaggcagacacacattccattcccagcctgctctgtgggtaggagaattttctacagtaggcaaatatgtgctaaagccaaagagttttataaggaaatatatgtgctcatgcagtcaatacagttctcaatcccacccaaagcaggtatgtcaataaatcacatattcctaggtgatacccaaatgctacagagtggaacactcagacctgagatttgcaaaaagcagatgtaaatatatgcattcaaacatcagggcttactatgaggtaggtggtatatacatgtcacaaataaaaatacagttacaactcagggtcacaaaaaatgcatcttccaatgcatatttttattatggtaaaatatacataaatataattcaccattttaacatttaattcatattaaatacgtacaaatcagtgacatttagtacattcacagtgttgtgccaccatcaccactatttagttccagaacatttgcatcatcaatacattgtctagagacaagactatcctgggtaggcagaaaccatagatcttttgtgtttacagctatggaaaccaactgtaccataaagatagttcactgagttttaaagccaagccacatcttatttttccaaggtttaatttagtgagagggcagcattagtgtggagtggcatgcttttgccctatcgtggaatttacacatcagaatgtgcaggatccaagtctgaaagtgttgccacccgtcacacaacatgggctttgtttgcttattccatgaagcagcagctatagaccttaccatggaaacatgaagagaccctgcacccctttccttaaggattgctgcaagagttacctgttgagcaggattgactggtgatgtttcattctgaccttgtcccaagctctccat

SEQ ID NO: 58 - protein, 398 aa, Homo sapiens
MERAREVIPRSQHQETPVYLGATAGMRLLRMESEELADRVLDVVERSLSNYPFDFQGARIITGQEEGAYGWITINYLLGKFSQKTRWFSIVPYETNNQETFGALDLGGASTQVTFVPQNQTIESPDNALQFRLYGKDYNVYTHSFLCYGKDQALWQKLAKDIQVNEILRDPCFHPGYKKVVNVSDLYKTPCTKRFEMTLPFQQFEIQGIGNYQQCHQSILFNTSYCPYSQCAFNGIFLPPLQGDFGAFSAFYFVMKFLNLTSEKVSQEKVTEMMKKFCAQPWEEIKTSYAGVKEKYLSEYCFSGTYILSLLLQGYHFTADSWEHIHFIGKIQGSDAGWTLGYMLNLTNMIPAEQPLSTPLSHSTYVFLMVLFSLVLFTVAIIGLLIFHKPSYFWKDMV

SEQ ID NO: 59 - DNA, 2986 bp, Homo sapiens
ccttgagaaaggattgctggtcatgggaccagaggctttatggggagggaagaactgttcttgactttcagtttttcgagcgggtttcaagagtctaacgtgaagacattttgctccaagaatatcctagccatccttggcttctcctctatcatagctgtgatagctttgcttgctgtggggttgacccagaacaaagcattgccagaaaacgttaagtatgggattgtgctggatgcgggttcttctcacacaagtttatacatctataagtggccagcagaaaaggagaatgacacaggcgtggtgcatcaagtagaagaatgcagggttaaaggtcctggaatctcaaaatttgttcagaaagtaaatgaaataggcatttacctgactgattgcatggaaagagctagggaagtgattccaaggtcccagcaccaagagacacccgtttacctgggagccacggcaggcatgcggttgctcaggatggaaagtgaagagttggcagacagggttctggatgtggtggagaggagcctcagcaactacccctttgacttccagggtgccaggatcattactggccaagaggaaggtgcctatggctggattactatcaactatctgctgggcaaattcagtcagaaaacaaggtggttcagcatagtcccatatgaaaccaataatcaggaaacctttggagctttggaccttgggggagcctctacacaagtcacttttgtaccccaaaaccagactatcgagtccccagataatgctctgcaatttcgcctctatggcaaggactacaatgtctacacacatagcttcttgtgctatgggaaggatcaggcactctggcagaaactggccaaggacattcaggttgcaagtaatgaaattctcagggacccatgctttcatcctggatataagaaggtagtgaacgtaagtgacctttacaagaccccctgcaccaagagatttgagatgactcttccattccagcagtttgaaatccagggtattggaaactatcaacaatgccatcaaagcatcctggagctcttcaacaccagttactgcccttactcccagtgtgccttcaatgggattttcttgccaccactccagggggattttggggcattttcagctttttactttgtgatgaagtttttaaacttgacatcagagaaagtctctcaggaaaaggtgactgagatgatgaaaaagttctgtgctcagccttgggaggagataaaaacatcttacgctggagtaaaggagaagtacctgagtgaatactgcttttctggtacctacattctctccctccttctgcaaggctatcatttcacagctgattcctgggagcacatccatttcattggcaagatccagggcagcgacgccggctggactttgggctacatgctgaacctgaccaacatgatcccagctgagcaaccattgtccacacctctctcccactccacctatgtcttcctcatggttctattctccctggtccttttcacagtggccatcataggcttgcttatctttcacaagccttcatatttctggaaagatatggtatagcaaaagcagctgaaatatgctggctggagtgaggaaaaaaatcgtccagggagcattttcctccatcgcagtgttcaaggccatccttccctgtctgccagggccagtcttgacgagtgtgaagcttccttggcttttactgaagcctttcttttggaggtattcaatatcctttgcctcaaggacttcggcagatactgtctctttcatgagtttttcccagctacacctttctcctttgtactttgtgcttgtataggttttaaagacctgacacctttcataatctttgctttataaaagaacaatattgactttgtctagaagaactgagagtcttgagtcctgtgataggaggctgagctggctgaaagaagaatctcaggaactggttcagttgtactctttaagaacccctttctctctcctgtttgccatccattaagaaagccatatgatgcctttggagaaggcagacacacattccattcccagcctgctctgtgggtaggagaattttctacagtaggcaaatatgtgctaaagccaaagagttttataaggaaatatatgtgctcatgcagtcaatacagttctcaatcccacccaaagcaggtatgtcaataaatcacatattcctaggtgatacccaaatgctacagagtggaacactcagacctgagatttgcaaaaagcagatgtaaatatatgcattcaaacatcagggcttactatgaggtaggtggtatatacatgtcacaaataaaaatacagttacaactcagggtcacaaaaaatgcatcttccaatgcatatttttattatggtaaaatatacataaatataattcaccattttaacatttaattcatattaaatacgtacaaatcagtgacatttagtacattcacagtgttgtgccaccatcaccactatttagttccagaacatttgcatcatcaatacattgtctagagacaagactatcctgggtaggcagaaaccatagatcttttgtgtttacagctatggaaaccaactgtaccataaagatagttcactgagttttaaagccaagccacatcttatttttccaaggtttaatttagtgagagggcagcattagtgtggagtggcatgcttttgccctatcgtggaatttacacatcagaatgtgcaggatccaagtctgaaagtgttgccacccgtcacacaacatgggctttgtttgcttattccatgaagcagcagctatagaccttaccatggaaacatgaagagaccctgcacccctttccttaaggattgctgcaagagttacctgttgagcaggattgactggtgatgtttcattctgaccttgtcccaagctctccat

SEQ ID NO: 60 - protein, 518 aa, Homo sapiens
MGREELFLTFSFSSGFQESNVKTFCSKNILAILGFSSIIAVIALLAVGLTQNKALPENVKYGIVLDAGSSHTSLYIYKWPAEKENDTGVVHQVEECRVKGPGISKFVQKVNEIGIYLTDCMERAREVIPRSQHQETPVYLGATAGMRLLRMESEELADRVLDVVERSLSNYPFDFQGARIITGQEEGAYGWITINYLLGKFSQKTRWFSIVPYETNNQETFGALDLGGASTQVTFVPQNQTIESPDNALQFRLYGKDYNVYTHSFLCYGKDQALWQKLAKDIQVNEILRDPCFHPGYKKVVNVSDLYKTPCTKRFEMTLPFQQFEIQGIGNYQQCHQSILFNTSYCPYSQCAFNGIFLPPLQGDFGAFSAFYFVMKFLNLTSEKVSQEKVTEMMKKFCAQPWEEIKTSYAGVKEKYLSEYCFSGTYILSLLLQGYHFTADSWEHIHFIGKIQGSDAGWTLGYMLNLTNMIPAEQPLSTPLSHSTYVFLMVLFSLVLFTVAIIGLLIFHKPSYFWKDMV

SEQ ID NO: 61 - DNA, 3506 bp, Homo sapiens
ggcggtaggagttcggcggaccgagaggttccgcgcccacttcgcggcccagaggactgagcccggcctccggtgcaaggaaaccccagaggccggaactagaattgcaaattttttttcaccccggattccaacggcattctgttataagcaacagagaatgaacgaagacagaaaattggaaccaagaagtgggattttgctgatgacaaatacctgaaaatggggaagcagctttggaactaggttctcactctgttacccagactggagtgcagtgacacgattacagctcattacagcctcaatctcccaggctcaagtgatcttcccacctcagcctcctgagtagctgggactgcaggtacaaaattcagtaggacacgactttctgagtcatatgctggatttgaggagatactgaagccacaagactgaaataacttttaaactgtgggtgatttggctaaaagctactctcatctattatatattcatcttactagttttgctctcagaggaagttcctgtttccaaggacaatgatttaaggcattgaagtggaactgagacacttggatcaaatccctgttctgccacgtgcaagagtctaacgtgaagacattttgctccaagaatatcctagccatccttggcttctcctctatcatagctgtgatagctttgcttgctgtggggttgacccagaacaaagcattgccagaaaacgttaagtatgggattgtgctggatgcgggttcttctcacacaagtttatacatctataagtggccagcagaaaaggagaatgacacaggcgtggtgcatcaagtagaagaatgcagggttaaaggtcctggaatctcaaaatttgttcagaaagtaaatgaaataggcatttacctgactgattgcatggaaagagctagggaagtgattccaaggtcccagcaccaagagacacccgtttacctgggagccacggcaggcatgcggttgctcaggatggaaagtgaagagttggcagacagggttctggatgtggtggagaggagcctcagcaactacccctttgacttccagggtgccaggatcattactggccaagaggaaggtgcctatggctggattactatcaactatctgctgggcaaattcagtcagaaaacaaggtggttcagcatagtcccatatgaaaccaataatcaggaaacctttggagctttggaccttgggggagcctctacacaagtcacttttgtaccccaaaaccagactatcgagtccccagataatgctctgcaatttcgcctctatggcaaggactacaatgtctacacacatagcttcttgtgctatgggaaggatcaggcactctggcagaaactggccaaggacattcaggcaagttgcaagtaatgaaattctcagggacccatgctttcatcctggatataagaaggtagtgaacgtaagtgacctttacaagaccccctgcaccaagagatttgagatgactcttccattccagcagtttgaaatccagggtattggaaactatcaacaatgccatcaaagcatcctggagctcttcaacaccagttactgcccttactcccagtgtgccttcaatgggattttcttgccaccactccagggggattttggggcattttcagctttttactttgtgatgaagtttttaaacttgacatcagagaaagtctctcaggaaaaggtgactgagatgatgaaaaagttctgtgctcagccttgggaggagataaaaacatcttacgctggagtaaaggagaagtacctgagtgaatactgcttttctggtacctacattctctccctccttctgcaaggctatcatttcacagctgattcctgggagcacatccatttcattggcaagatccagggcagcgacgccggctggactttgggctacatgctgaacctgaccaacatgatcccagctgagcaaccattgtccacacctctctcccactccacctatgtcttcctcatggttctattctccctggtccttttcacagtggccatcataggcttgcttatctttcacaagccttcatatttctggaaagatatggtatagcaaaagcagctgaaatatgctggctggagtgaggaaaaaaatcgtccagggagcattttcctccatcgcagtgttcaaggccatccttccctgtctgccagggccagtcttgacgagtgtgaagcttccttggcttttactgaagcctttcttttggaggtattcaatatcctttgcctcaaggacttcggcagatactgtctctttcatgagtttttcccagctacacctttctcctttgtactttgtgcttgtataggttttaaagacctgacacctttcataatctttgctttataaaagaacaatattgactttgtctagaagaactgagagtcttgagtcctgtgataggaggctgagctggctgaaagaagaatctcaggaactggttcagttgtactctttaagaacccctttctctctcctgtttgccatccattaagaaagccatatgatgcctttggagaaggcagacacacattccattcccagcctgctctgtgggtaggagaattttctacagtaggcaaatatgtgctaaagccaaagagttttataaggaaatatatgtgctcatgcagtcaatacagttctcaatcccacccaaagcaggtatgtcaataaatcacatattcctaggtgatacccaaatgctacagagtggaacactcagacctgagatttgcaaaaagcagatgtaaatatatgcattcaaacatcagggcttactatgaggtaggtggtatatacatgtcacaaataaaaatacagttacaactcagggtcacaaaaaatgcatcttccaatgcatatttttattatggtaaaatatacataaatataattcaccattttaacatttaattcatattaaatacgtacaaatcagtgacatttagtacattcacagtgttgtgccaccatcaccactatttagttccagaacatttgcatcatcaatacattgtctagagacaagactatcctgggtaggcagaaaccatagatcttttgtgtttacagctatggaaaccaactgtaccataaagatagttcactgagttttaaagccaagccacatcttatttttccaaggtttaatttagtgagagggcagcattagtgtggagtggcatgcttttgccctatcgtggaatttacacatcagaatgtgcaggatccaagtctgaaagtgttgccacccgtcacacaacatgggctttgtttgcttattccatgaagcagcagctatagaccttaccatggaaacatgaagagaccctgcacccctttccttaaggattgctgcaagagttacctgttgagcaggattgactggtgatgtttcattctgaccttgtcccaagctctccat

SEQ ID NO: 62 - protein, 307 aa, Homo sapiens
MKPIIRKPLELWTLGEPLHKSLLYPKTRLSSPQIMLCNFASMARTTMSTHIASCAMGRIRHSGRNWPRTFRQVNEILRDPCFHPGYKKVVNVSDLYKTPCTKRFEMTLPFQQFEIQGIGNYQQCHQSILFNTSYCPYSQCAFNGIFLPPLQGDFGAFSAFYFVMKFLNLTSEKVSQEKVTEMMKKFCAQPWEEIKTSYAGVKEKYLSEYCFSGTYILSLLLQGYHFTADSWEHIHFIGKIQGSDAGWTLGYMLNLTNMIPAEQPLSTPLSHSTYVFLMVLFSLVLFTVAIIGLLIFHKPSYFWKDMV

SEQ ID NO: 63 - DNA, 3236 bp, Homo sapiens
gagggaagaagggagaaagagagagagatttgaatatacattgcttcaaggatgcaaaaaattacaacctggaaaaggcttcgagtaactttaggaaaatgagctgctggactcctcagtcaatctgtcctttctagtcaatgaaaaagacagggtttgaggttccttccgaaacggggccggctaatttagcccctcccacgagcccaagggtctgttatatctctgtttccttgaggacctctctcacggagacggaccacagcaagcagaggctgggggggggaaagacgaggaaagaggaggaaaacaaaagctgctacttatggaagatacaaaggagtctaacgtgaagacattttgctccaagaatatcctagccatccttggcttctcctctatcatagctgtgatagctttgcttgctgtggggttgacccagaacaaagcattgccagaaaacgttaagtatgggattgtgctggatgcgggttcttctcacacaagtttatacatctataagtggccagcagaaaaggagaatgacacaggcgtggtgcatcaagtagaagaatgcagggttaaaggtcctggaatctcaaaatttgttcagaaagtaaatgaaataggcatttacctgactgattgcatggaaagagctagggaagtgattccaaggtcccagcaccaagagacacccgtttacctgggagccacggcaggcatgcggttgctcaggatggaaagtgaagagttggcagacagggttctggatgtggtggagaggagcctcagcaactacccctttgacttccagggtgccaggatcattactggccaagaggaaggtgcctatggctggattactatcaactatctgctgggcaaattcagtcagaaaacaaggtggttcagcatagtcccatatgaaaccaataatcaggaaacctttggagctttggaccttgggggagcctctacacaagtcacttttgtaccccaaaaccagactatcgagtccccagataatgctctgcaatttcgcctctatggcaaggactacaatgtctacacacatagcttcttgtgctatgggaaggatcaggcactctggcagaaactggccaaggacattcaggttgcaagtaatgaaattctcagggacccatgctttcatcctggatataagaaggtagtgaacgtaagtgacctttacaagaccccctgcaccaagagatttgagatgactcttccattccagcagtttgaaatccagggtattggaaactatcaacaatgccatcaaagcatcctggagctcttcaacaccagttactgcccttactcccagtgtgccttcaatgggattttcttgccaccactccagggggattttggggcattttcagctttttactttgtgatgaagtttttaaacttgacatcagagaaagtctctcaggaaaaggtgactgagatgatgaaaaagttctgtgctcagccttgggaggagataaaaacatcttacgctggagtaaaggagaagtacctgagtgaatactgcttttctggtacctacattctctccctccttctgcaaggctatcatttcacagctgattcctgggagcacatccatttcattggcaagatccagggcagcgacgccggctggactttgggctacatgctgaacctgaccaacatgatcccagctgagcaaccattgtccacacctctctcccactccacctatgtcttcctcatggttctattctccctggtccttttcacagtggccatcataggcttgcttatctttcacaagccttcatatttctggaaagatatggtatagcaaaagcagctgaaatatgctggctggagtgaggaaaaaaatcgtccagggagcattttcctccatcgcagtgttcaaggccatccttccctgtctgccagggccagtcttgacgagtgtgaagcttccttggcttttactgaagcctttcttttggaggtattcaatatcctttgcctcaaggacttcggcagatactgtctctttcatgagtttttcccagctacacctttctcctttgtactttgtgcttgtataggttttaaagacctgacacctttcataatctttgctttataaaagaacaatattgactttgtctagaagaactgagagtcttgagtcctgtgataggaggctgagctggctgaaagaagaatctcaggaactggttcagttgtactctttaagaacccctttctctctcctgtttgccatccattaagaaagccatatgatgcctttggagaaggcagacacacattccattcccagcctgctctgtgggtaggagaattttctacagtaggcaaatatgtgctaaagccaaagagttttataaggaaatatatgtgctcatgcagtcaatacagttctcaatcccacccaaagcaggtatgtcaataaatcacatattcctaggtgatacccaaatgctacagagtggaacactcagacctgagatttgcaaaaagcagatgtaaatatatgcattcaaacatcagggcttactatgaggtaggtggtatatacatgtcacaaataaaaatacagttacaactcagggtcacaaaaaatgcatcttccaatgcatatttttattatggtaaaatatacataaatataattcaccattttaacatttaattcatattaaatacgtacaaatcagtgacatttagtacattcacagtgttgtgccaccatcaccactatttagttccagaacatttgcatcatcaatacattgtctagagacaagactatcctgggtaggcagaaaccatagatcttttgtgtttacagctatggaaaccaactgtaccataaagatagttcactgagttttaaagccaagccacatcttatttttccaaggtttaatttagtgagagggcagcattagtgtggagtggcatgcttttgccctatcgtggaatttacacatcagaatgtgcaggatccaagtctgaaagtgttgccacccgtcacacaacatgggctttgtttgcttattccatgaagcagcagctatagaccttaccatggaaacatgaagagaccctgcacccctttccttaaggattgctgcaagagttacctgttgagcaggattgactggtgatgtttcattctgaccttgtcccaagctctccat

SEQ ID NO: 64 - protein, 506 aa, Homo sapiens
MEDTKESNVKTFCSKNILAILGFSSIIAVIALLAVGLTQNKALPENVKYGIVLDAGSSHTSLYIYKWPAEKENDTGVVHQVEECRVKGPGISKFVQKVNEIGIYLTDCMERAREVIPRSQHQETPVYLGATAGMRLLRMESEELADRVLDVVERSLSNYPFDFQGARIITGQEEGAYGWITINYLLGKFSQKTRWFSIVPYETNNQETFGALDLGGASTQVTFVPQNQTIESPDNALQFRLYGKDYNVYTHSFLCYGKDQALWQKLAKDIQVNEILRDPCFHPGYKKVVNVSDLYKTPCTKRFEMTLPFQQFEIQGIGNYQQCHQSILFNTSYCPYSQCAFNGIFLPPLQGDFGAFSAFYFVMKFLNLTSEKVSQEKVTEMMKKFCAQPWEEIKTSYAGVKEKYLSEYCFSGTYILSLLLQGYHFTADSWEHIHFIGKIQGSDAGWTLGYMLNLTNMIPAEQPLSTPLSHSTYVFLMVLFSLVLFTVAIIGLLIFHKPSYFWKDMV

SEQ ID NO: 65 - DNA, 39607 bp, Mus musculus
  misc_feature (1)...(39607): n = A,T,C or G
ctcagggttttccgcaatcaggccagcccttctactgctgtccgttttttgggtccagcaaaataacagaagacagcgaggtggacttcctggagggggtgatagctcacatcagaagccatctgtagcccggtaagtccagggagaagaaaccccatcccgtgttttctccccctgttcctagcccgtgcctctttatgcaggaaaaaaagaaaaagaaaaaattataacaaattcagacgggagaggcagggactccctttgataacagggttgtccctccatcctccatgggtggctcctgctccctcaatcctgctgcctacccaagtctcttcagacacccacagagctttctgggcaccaattgaacaggacctccaaggcacagcaaagtctgtgggggatggggagaggtagcaggggcgagagaggagaatccagaggtagccagctgcttttgcagaagccaggacctcaggatcatagcccctgtccctcggacctagcctaagactaagtctggccacaggccagtcaacctccaggccgactttggagatcttaaatagatttgcaaattttccagattcctgagacatccttccaaacctctaaccgctgccgagaaaactctgggtctcaaagttctggatggagggaagtttacaaacccgcctatcggtcatgtgtctggggtggggtctagttccgggctgtcagatctgggggctcctctgtgaggagggattgtagctggtttccttctgtcacagtctgttgttttcctatttgtcctctcctttggtgctcgctcactcactctctcactcggctctttctccaccctatcctaaaatctgaactgagtctgataacacttcctccctcttgcccaaatctctctgcttctccccagcatctatagactggcaagccccaccttctcactacagaaggaccaaacccagcactctgagtgtcccctgtgatgctcacctgcatccaggggcatggatgcttcctttctctatgttgatgtgacagacacctaactggagccacagcccagtagcagggctgaggtgactataagtttcctctaccccacggccccagacagacctgggcccttggtcccagcctgctttcttacttccagatggtcagattccagcatttgtgagaggaatttacactaccctgcctggaggcatttgccctcccctcatccgcctcggaatgttcttcctcatcatttccctctcctgggccctccaaccacgtctcttccaggcagccctccctggttcctcccatcttgtctagcaccctaccactggcctccactcgacctctctgccactgtttgcacagcacagctctgtgcctgccctgctccccgctatcccggatccagctctgggttgtcagtgggaatgcggtgtccaggaggaaggattcactgaagcctccaaccaacctttgtaaagtgatcagtcctccccagtctccagggaaagagcaatcatggtgtcactgtcacagtgagcctgttgcacgtccactttgtattccttacagcgaggcttcctagccagttttgttacccctgtttatggaaaaggaaacaaaggctccaggctcacacagcagagctagtgttcaggccgaggtgcaagtaaacccaaggctgtgcccctatgccctggtactgcagcatcaggccggtttccctcctccttctcctgcagagcttcctcctggcttctgtcatccccagcagaaagtgtagcaccaggcctagatgcttcaagaccaccccccacccccacccccatcccccgccccaatgtctggtcctgagcaaggagggaggctgtctggcaggctcacacacatttgcatggcagagtggtgttatcagcagccctctttcctctgtgggaaaaaaagctggacttgtaattgctagcagatgttgggaggctgtggaaagcccaggggatttaaagtcaaaagcccattcttacataagcaccctggggctagcctggcatctctgggctgctccatacctaggcgttgtgagcacactgatcaacagcaggtgttaactgtttgtttagagacagggtctctctaggaagtcccgactcttgactgtactgccgctcactattacagaccagattggcctcaaacgcacagaaatctgcctgcctctgcctcctgagtgctgggaccaatggtgtgtgttactatgcccagtcatgtgttaatttttgatgtgggctgagtgtgttgcctctctgggccccattcttctctgtgaacagtgtgacagtttgtgggcttagcaagatacaagatgttagcctgattactgcaagctgtggccacagctgaggacagccaacactcaccacttcctgtacatcagcatccagataggaaaatgatctatagccctagaaacctctgactgtggaagggacctagacactcggtacctgtatacaggctgggtttgagactagctgccatcaggctgtgatagggaacctggttccagaccagctgccctcatcttttgttctaggtaggccccttggtgtggtggagaggaaagaaagagaagccaccagatattccagaaagacggttctgcatcctggcagtggggtccttggaatgggactttttttccatagtcagcttaccctggaagcaattaggtaggagaaaggagtcgttgctccccagaggccccctgtggcccctcagctagtatgggcagagccaatgtggaacagttgttaggtatgctttaaccttgtgccttgaagaaaccttgaagttctctcgttggtcctcagtgcttggcattcacatttgctaggctaactaaatcttgcaatcttaaggagtagatacaaatccaccccattttacagatgaggaagtacctgaggaggcttaatcagttgctcagagtcccgcagacagatagtccccagatagggtctgggcttagcatttgggtgtttctggcttcagagtctcatgaggaaaggctgggtggggtccgggacccagtataaactccaagggcttgtcccatctgtccacagcattccagaaaggggctccaatcccagaaggccatgtgacagccgtgggcctccgtcctctctcagtcaaacaaagaggttgaccccgatgatcactgagctccgtgccaccacagaacaattccaggattccaaaccctgccagcccagactggcagcggcacaagccctgctgtgtactcagggatcatgcatatttaactttacaatgaaagggttttttttttttctttctttcttcttcttcttaccctttctctacacattgcagaaagaggtctggatcaatggctgctaatggaaaaccttaacctgcaataaggaggagaactttctaacctggagaggctcctttaatgcactcggtttcccgtcccagggcgtgttcctgccagcttcatgcctatttccctaagagcaaggagggctgtgtgagaatgacctgtagctcctatccagggctgagctatggaagaggaagcaggcttttggcccaaaacaaagaggggcacaaacaggagtggtgtctttggacccccagtgagccacccctatgagagcaatacaaaattcacacacttgccacgtgtacagaaaccctctaggtatccttcccccataaggcttagggtctgagactcagagaacggcttcctggtcacccagacctggccccaaggctcttcttctcccaagcactttcttaggggcacagataatgcttagtctgatggaggtgggagaaaatcaaagtatgtctgtgtacagctttaatcacattaataccctcgctccttctgcctcggagtatgcctgtttgatgtcctgatacttggcgctttcatctgctggatgttctagcttctccattctgtgatgggcagacagcaccgtccctggggaaggtcagaggctcaagaattgtccgaatgtcagagatgaaaaggtttgcaggtctcatttggtttgatttccctatggtatggggggtggacccaaggtcataaataaaaggcaggatgaatctcaagccgggcagatcacaggtaatgggagcaggcatgtgtccataccaccacccaaaagacacagaggggtccccgctccacctgctgtctagggaccagccttcatgcctctctgggagataaagctacaggacaaatttttgcagaagaagaacaaagctcacccccactccaaacctctccttgctccagggtttcaggtgtcgcaggttggcttggccttcgtaaccaaggatgaccttgaactttccaatcctcctgcctctgcctcctaagtgctaggttgataagcgtgtccccccatgcccagttttctatagtgctggggaccaagctttcttgcatagcaagcactctgctgactcgggcacaacccaaagagcctgtttgaaggatgggacgccctggtgtggttttctggattgtagaactcccagacccactccttctccattctgaccataggcttctcttctgtgaagaagggaagaggaggggaaagataaatggctccagcagcccacccggctctgcttctagcattgaaagccctttctgggtgccatggtggcagactcctccttttctagacagggtcttatgtagctcaggcttaccttgaacttgatactcagatgaagttcaccttgaacttctgaccttcctctctccatgtcctgtgtggaggaggggcaggcacacaccaccactcagaatttatgcagagttggggatcaacctggagttgctcacaggctaggctaacactctcccaactgacccacataccctgttcctcctgccaggctttgtgaggccgttggtcacgttttgttggggaccttattacttttcttttctggcaagtgggttcccaagagctgtagtcccacaagctcctccgctttcctgaggctgagcttaaatggtacagaggcagcagggaagttcagaccactccagagggaggccagcctggtctacagaacagccagaactacatagagaaaccttgtctcagaagagaaggaagaggaggaggaagaggaggaggaggagcaagaggaggaggaagaggagcaannnnnnnnnnnnnnnnnnnnnnnnnnnnnnnnnnnnnnnnngaggaggaggagacaaaacaaactacccccccttctcactttatacctgccccacataatatatacctgcttctgttgggggcttctggaggggtttggaacaacttccttctgtaaacaggactctgattctgtccctgtgccagctcacaacctcccatgaaatacctgctcatgccactctcctatgtgccccacccccacccaggtttgccattatggcactctcacctccagtagctagccattcaccatcactgttaaacccctgaaaaaatgattcattgctatatccaaggcaaaggtcaaatcctcacccagtgccccaagccattcccaaaggcttgccctccttccctgcctgccacccataacttggctgataaacctcagttctagtctaatagacctgtcgctgcctttcaccccacatgccctcccacttcccaaaggtcgctcacacagaatgctgtgccatggcttgccctggcatcattcgtcatagaacccaactaaaccccagaggccaagcctcacagaatcacggcagctaccatttactgatcggggaacgacgacacaggctcctcatctcctctaactgccatagcaacagcagaaggctctcatggcactcttccggaaacacaggcacaagctaacctcagagctgccacagcaagtccaggtaggagaactgagatttggtgtggacgaagtagctttatgatggaaaagctctcccagcctgcctgagctcccgtgccatttccctatcctgggtgccatcagggacagcccactggcttcaggataccatacgtctgtctattctgctcccaacagctgcctgtcttatcaccaagaggaaaagagtcacccttgtctgcccaacccagtccccaccctagaaaatactgtcactaggtgatagctgaggatgaggcttgaagaagagaagggatcactttgcatagccaatccatcccgtgctgtgtaggcgtcaacgaagggagcactgactacagacaggctcagttcgacattgggaatttggagagatacaaaataaccattaggtttgttctgtggtttgtggaaaatcaaattgagggctagaggaggcttaggtgatagccacagaccgggagacatctatcaggtttagcttatccttaggctgaccactctgtgggtggctgaggacacttctcactgagcctcagagtagcacaggggagtggagctgtggcaacctcatactgtcggtggctcccacttcccaaggagccctggcagcttctacttcccaaggagcccttctctgggccttcccaagccatctcctgtattactgacttcttttccctgaccacactagtctaccaggtctcagctgtgcattcgagacaggctgagtgagtgagttctcctgtgggcagagaggggtagagaaggtgatctctgactttgtatgggggtacgaggtcctcctccaagtttctgctcgcatgaacttcattcacagtctcagtgtaaaggcctggtttacagcctgttttaaggcccggagaaggaaccatgaagaagtcgagttaacagtcagagggagaaccggagggtgaagcaggaagggatagggaagagatgctgagaacgtacgggagaggagaaggaaacgtgaacacactttccttcccaattcactgcccaggagggctctgaggggaatctcaatgctctataattggcacggattagtgtcggggtttcttcgtagccagcagctcctgcctggtctgtgggctatgggctggtgggggaaggccgtgtgctggtcttccaggcttgggattcgaggtctgcttgccccctgcccacttggctctgggagcacattccccatgagcttcccccccccaccccccccagcccacggctgatcccgatggtagcagccagggaaacagaaggtttgcttgtttgcgcctgctgcactcatcccagccccagcccaggacccctctcaggggctcctttggctgccagggcctggtgctctcagttgccatggcactagatgaggctctagaggggggtggtaggcagggagggcagccgagggaggtggaggctagaactctgtagcttcccaggctctggcctgctgtgggtattctagggttgctggagccatagaggcaggcctgaggtagagctggcaactcactgagccagactccctagatgctctatctcaatggccctaatgacaagactaaacaggtttttctctgaaaggatttccttctgttttttggatagaaccttactatacagtcttggcctgcctagaacttcgaatgttgaagctggccttggactcatagagagctttctgcttctgcttcccgagtgctgggattaaatgtgtatatcagccaccatgcccaggctatgggtccttctcttaataccctactgatgctcagattctatggtgacgtctcaaaggggctctgactcctgtctcaccttgtcttttgaattgcttcatgaccagcaggagcaggtccccctgtgcactgccctcagttgtgttgcgtggataccatgtgtggatacaactgttgtgtggataaaatgaaatctgtgggccacttcattaaacagaatgtctggctctacattagttggggctttcatttgtcttcagatcggaacagtgggtgggaagaaaggttcagaggctatgggaaggttggtgtaaggtacagagtaagacagactgtactcaccatagtaaaaccactgtggtggtctgctctctgaggaccctgagctgtctaggtagaaagggccacaggggccttggtgagattcctgtctcaggctgtgtgcaattgcagagaaggtggggattaaggcatgtgtgacccctactggccctaagattgtagcatgtatgactgtcaatgtctttgtctttggcctagctcaaaagagagtgtgaagaccagaataggaatgaacaagcagcagtcatgtgactggcatgcagttggtgctgcttgggcttctactgtctgttctgtaggcgtgttcagtggatatgagaaggctggtagacagaagcagggaccaacctgttagtcctgcaggagaggcagagagtgagtgggtgggtgttgggtctgtgtgttagagaggcttggggacagcctaccaaggatttcgcactgtaaccttcgctgggcaaatgatgtgtgtcctttctagacctcagtttcctcatctgtgaagtgggaatgcagcagggtgtggtggattggaccgagaacctgacaagctcactctcgggagagcctggaacaggtggcaggcaaggtcttaaataggccttctgtgactgtgcaaggggttctgagcccagaggggatggcccaaggtagagctgctaccatgttggaactccccaaggccatctaagtccacatttcttctgaaataactaacaagggacgcctcgattaagccctggagactggaagccaggggtcccagggcatctgcagagccaggctgtatggcctgaaacgaagccgtgggggctgagcctgaggccggcaaggcgcctgaggcagggggcaggaagtgcttgctctgcaggcgcctgggctgtgggcagaggcatggttggatctcccatcctcctctctgacctccttcccaggcttggttcccagcatgcatggggacccaggtcccctccctggggcccctagtgctgtcaggcacacactgagactttcccacaggctgttagaatgtcattcaatccccagcacacacactctgtgggggctggggtgggggtttgcggttgggggggggtcggtttgttctttatctgcctggttcctttccagacagatgtttcgttttattttggacttccagaaaataggggccgtttcttttccatttttttttgtcccctggggaggcctccaggggagaggagcacagattgagtgtagttccctggggagcagaaaggacggtgacctccatcctggcgatggtccctatagccgctgtggctcctaagcggcctgtgcctgagggccacagagagagatgtggacaggtcagggggataacaggatcagatgggagctacagagagagggagtgaggacagaggggacaagggaaactaagtagggaggcaagggacatggagatgctcctgagaccccatggaggggattcactatggagtgacagcatgctgggacttctccagtaaaatgtgccctagggtggagggatgggtcgtttcctccccaggtttctcactccacttataactgtaccctcaccctccagaccctcctctggctccgaggattagggtggagcggggcagcttcctaactggtactataaggtcagctggctccgggaaggctagaagtgccaaactctgttaggtgcagaccaagactattgtcacttgctcactgtccagctgctggccgaggattttgtccctggctgcagattcctcactcccccccccnnnnnnnnnnnnnnnnnnnnnnnnnnnnnnnnnnnnccccccccccccccgccccaacgcccagtctagaactggctgactcttctgagctgagtcatggcatcccagtctgggttgaagagactcaccccccaccctcacccctaacccagcattccaagctcacggggcaagggtcccgagagctgtaatgtcagtctggagagttttcccactcttcttgtcctgggctgtaaaatgggacgactgagaggcgataaccaggttcgcgtccatctgtctgggggctgtgaagaagccttgatttggaacataggacaaagccaggaagcaagtttgtgtccacttttgtcagtgatttttttaagcaggtcacacctctgaatctctgtcacgggtctccccctgtctgggtcaggttaaggaaagtgactgttctgtggagagacagagcttgatgatgtagctggaccctagacagtgagcaggcgctgggagtgggacccaggcgggcaggtgagctccaacggcccatagcccactagagcccatcctgctgagagccagtgggacgtctcatttccctggcccaacccttagcttccccatctgtacagtgagccacagaaagggataggtagatgtttcctggccacagggcactggcatccaaagattctgaccttgtgaccccaggattgggcctcccgcttgggtatcttgtttattcagaacttggtgggaccgaagctggccgactccaccaaatgcccctttgaacggcagctggctttctgctctcccatcccatcgtgtttttgtccgacctgacctctgccccgactcagtgccaacaaaaccctccacatttgaaaccagctctgcggccactcttaagcccaagtattgtctcattctcatcttagaacatggttttgtgctcctgtcgtaggcactcatagactccatacctctgggacctgcctcttgggtccttctaacatgcagtcaccaagttctgctgaccctcagggacattcatctcaaagccatctgtctcagtcagtccccacccactaccctctgcccaaccacacactgtatcaagggaagccagcagggggtggcaggcggtgagcaggcacgctgcctcgtttcagcctcttcgttcctcttgtctggtctgcatttcttggcaatttcccaaaagcagtttctgtcttcgttctcttaccaacaaaatgggaataatccttctaagagttgtcagaggatccagtgagactgaacatgccaagtactgtacagcaagaaaggcttggggctcctttatgcttgttcacagatacgtgggcagagggcgactgtgattttgtgtacacatggtctgtatatgtcctatgttagggggcggggggattacatgagtaactgatatacacaagggcgtctctgatggacacctggtaaagtttccaagcatccatccgtgcagtgtacacgtgcactgggcactgagggggctgtgtgcacgtgtgtctggtgtggtggtgtgggcacgcacatggttcgtgcctgagtgacggctgggcacacacccgaagagctacacatgtgtgcagaagaatgtgtgtgtgtgtgtgtgtgtgagtgtgtgtgtgtgtgtgtgtgtagagagagagagagagagagaaagagagagagcgtaggcagcatctgggctgtgtgcatgtgttcgccgtatgcaggactccttttggcagcagtgcaggccccgctcccccacccccccttcccaggctgcttgtgtcgtgggagcctcaggaccccagggaggaaagctgatgctggcggatgtggccaagatgggttagatttatttagattaagatggtgggaaaggagtgggaaactctgagtgcttgcgacaagcgggaaggatggcccgagcctctgaggatgacttgtccccctggggctcactcctgttccctaaggggtgtctcacagctgttgtgagaagctgagcagactcccatctctgaacatggcctgaagaggacagcactgaggtcttcctgaccacagcaaggcagtggtatttgggtttttttttttttaacccactctgataagtcctcgatctgtagcttgctgtccatgccttcgtctataccccaagttcatttgatgggattcacctgaaaagtcatctaactcccagtggtgtagagaaaggaactgtggccatttatacaatgtgtctgaatctacaccctggatcagtgagatgagatgggtcatggattcccaggtactgtaagcttaaatatgtcatctacattcccgaccagccatttcttcttcgggccgccccactgagaattatggtggccggaactttctttttgataagtcaaacaggtagaacttttgaatagtgacagctctttaagatcacagagctgggcgtggtggtgcaagcctttaatcccagcgcttgggaggcagagaggcaggcagatctctgaattggaggtcagcctggtctacagagtgagttctgggatagccaaggctacacagagaaatcatgtctcaaaaacaaaacaaaacagcaaaacaccaaaacaaacaaacaaacaaacaaaaaaccaaaacaaataaacaaaaagaggctcatcacaacctgtctgggaatgaatatgcaaacaagtcccaggctggcaggagatcaggtcattgtcacagtgtgtcaagggcctggtgaggggagccggtcttatttcagagagaatcagactggcatcattgacttgcagtgtcccttagctcctgtgctttgtctgttctcctgacagctggactccactttgtgtctatgtgacctgatcacaattctaagcctctttgggtctctacttcacattcaaggctccttcccaacttggagtccttacttgctaccccagccttattccttgccagagagggcctgagaagggaagatggagggccacaaagcagaagggtaggggaactgcatgccatgaggttccagcctacagggtcaacacagcctaccagagtcaggccagcctccttacagtgacctcccatcccctggccagcaggccaaattcctcctttagaataataaacagtgtggccagccagggaggctgggaggggaggggaggggaggggaggaaggctgagatgagccctcccccatcctgggctgctaatgattttctttggcccacatctctggcaggaagtggggagccagaggggcacccaccaaggggaagatggcctctgtggagcctgttggctctgcacccaaatgccgtctggtctgtgcagctccaggatgcctggtgtccagctggagggtcggcacctgagggttgtgatgggggaggactgagattggggcatcaggaagggacattctaagaggagaaactcagggccagagggggcctcgggcaggctgtctgaggatgggttaaagaaggaaaagcaggtttgtgcaggttgcttcttagggtctcgaacagagctggggtaccgccttgtccgtgtctcgtgcaccacttgtgactacagtccttgcggatggtgcattcattagctcctctctggctggaggctctgcccagagacttggcccaggccatggagctcatgaaacctggctcctcagccttgcatagcaaactagaaagagcaacgtgatggagcacaaaggagacaaactggtccaggctgggcagccttacagtctcaggattctccttgttgcctgtcacatgactgcctcctatgtttcttgatctgtgactctgaccatacccggctattggcaattatctggaatctgaggaagattgagaggctgttgagaggaaggaaggacgatacaacgtgccctgttcccaagtctcctctctctctctctctctctctctctctctctnnnnnnnnnnnnnnnnnnnntttgttcctcagtttccccatatagacacggtaggtggaggtggaaagtggcctccaagggccttcaaagcttgatgaattagatggggctaagaacctggctcctctctcctgggcctcctttgcagctctgtgctgagtaggggggtcagcccactcccacattccacagtcctgacccccgccccctccccacttcccttcccacagacatcccatttcctgttgtgcttgtagagggagccgtgggagctcttcaggctctggctctccccctcctactcctccaggcctttcatcacactttcccaaatatttgtcctggcagataagtgcctggtattggaactgtcaccgggaggacggggctgtcagagctggctggcccccaatctagcccaattcccccacctccattgtcacatacagggaaactaagactcataggctaaggactcaaccaaggtcatgtaagatgtggaagcagagaggagagcatttggggacctggatgtcttcccagccttgagataggaggatggatgcccaggcagagttgaccctacaggagccaggtctaaggtgggccctggcactgcctttgcccacactggaccctgatccctgttttactctgcaggacaccatggggcttccaggagtgataccagctttagtcctcagaggtaagtaagctggggacaagggtgagggctccaaggatgcccctagggagctggcaatggtgatgcttggtagacaccatgacctgagagtctggaagctccacagggctcttgagccccgtgtccctggattgggaggtggtctgtggaggcctctttcatctgttcagctattagcttttctttacatccacacaatggatttctccttgcccagaaccaccagctcaagttccttgcttattctcctgcattcacagttccctctgagacaccccagcctcccctactcctcttcagtccagctggatgcctgccttaagctctccaaggtctgggcaaatgctgagcatcatcagtgatgagccagtggcctgccctactgaccactgtttgatggccctgcctactggctgcatctgtcctgacttttatcactagagaacatgagggtgtggtgaacagtggtgaccatagcagcttatcccaatactcccagaaggtgcatgacagaggcaccaattatttgacacatacacatcttaaccctccccagcccctgtccttcaagcccccaggggcctcagtatcttaatggccctaagtctgccccaactctaagctaggtgagaacccctttcctatggtctagtcaactgtgagctctacaggaacctaagcatctacagagaagaggaccagggagtgacccggaaggcaatgcaggaactggaggtccagggattgcttccacaggatttcctgcccctttctcctgtgtgctgcctgcacatagcatagctgaggggtttggaggctggagtccaaagaggcagagacctaggacaggagcccttgagggcctgacagtggtcaagcaagcagcttgcgttgaatgggaagatgtactctttaaggtcttggaagttagtcagacaggcttcccagacagctttgggggaggggttaaggtctccttgccctgaccatgacgtgtgactctttctgctcaaaggccagttgttgctgtccgtgttatggctcctgggaccgcagacctcccggggcctagtcatcacgccccctgggccagagtttgttctcaacatctccagcacctttgttctgacctgctcgggctcagctccggtgatgtgggaacagatgtcccaggtgccctggcaagaagcggccatgaatcaggacggcaccttctccagtgtgctgacactgaccaatgtcactgggggagacactggggaatacttttgtgtctacaacaactcactagggccggagctcagtgagaggaagcgtatctatatctttgtgccaggtaaggacactagcctgtgtgcctattcctttaccctcatctatacagcacatagcacaaaagaaaacttgaagactacctcagggctctgtgagatgcagccttgtgacacaggcaaagagcagcatccagcctggctcagtccaggagcatgctctttccaccggttgtctgctcgctcccagccctctctgatctcgccttccaagaattctgcattctccgttggtttcaacctgttcattttggctcccatatcccactgacccgttctttgagccctaggtagcttatgacctctttactcctcactctaactccagccctgtcagcatcgaatgaagaacaggaaatgaccagtgagaacatcttcttcagtctcgctgtgctcctagaacaggagatccaagagtatttgtaaaggacagaattgaccagcacactgttctggtgtggcaagggccagcatctagcaagggccccctcaagatctagggaccagcatctggcaagaatatcttctttatttttttttcttctcttctctcttcctcgtccccccaccttggtctcacacgtagccttggctggtacggagctcactgtgtaatccagttggcttcaaacttatagaaatccatctgcctctgcttcctgagtgctgggattaaaggcaggtgctgtcgcactgggcatctttcccttaatttttgaggcagtgtctagttgttatatggccagcgatgaccttgaacctctgaccctcctacctgcatcacctgagtgcactgtggcacctctttcatgaatgctaggcaggccatctacccactgagctacatctctagctgcagcaaaagccttgctcccttatatcatggaaaagactgaagggcaagaagagaagaggaggctcaacttatcctttgtaactgcaccaattcgtgatgcctttaagagtaatccacatgcctctgcttttctttttaacactggggattgaacccagggtcttggccatactagggaaggatgttacctctgaactaagatttatttgtttattttatgtatatgagtacactgtagctgtcttcagacacaccagaagagggcatcagattccattacagatggctgtgagccaccatgtggttgttgggatttgaactcaggacctctggaagagcaggcagtgctcttagccatggagtcatctcttcagccctaaattaattattatgtgtatatattaattattaatgtgtataatgtgcactctgtgtgtgcgtgcgtgtgtgcatgtgtttgtatgtgtgcctgtgtgcgcatgcatgtgtatgtatgagtgcatgtgtgtgtgtgtgtgtgtgtgtgtgtgtgtgtgtgtgtgtcagccacacgaaggccagaagatgctgttggatccactggagctggagttacaggcagttgtgagctacttgatgcaggtgctaggaaaaaaatgtcaaactgtccagaagagcagcaagtgctctcaacccctaagccatctctccagatcccactattattggtttatttggtttttttttttaactcttttattttgaggtagagtgttgctagatcaccatgactggccttgaattcacccaggagcattggcaggcctcaaatctacagttctctaacctctccattctgcttcacaagtagctgcgaggccaggccttcccacccagtccatctgacaatcatcccttaataatcctacctgtaaacactgttataatggcagttatatttgaatgcagtttggaggggaccaatgtcaaaactggagcagcatccttattctgcattgaggtgactgaggggcagagaggggaagagaccgctcaaagtcaaaaagcagttcacgggacagctagaaacccaccgtcccagctgtgattaaacatcatgacctggccagtagcaatttgggaagggaagggtctacttcattttaatatcttacagtctgtcaggaagagaagttggggcagggacctggtggtagggattgaagcagagaccatgaaggactgctgcttactagcttgctcctcatggcttgcttagcttgctttctaatataccccaagaccatctgctcatgagaggcaccacccacagggtgctgggccattccccatcgatcattaatcaagaaaatgccccacagacttgcctacaggccatcgcagtggaggcattttctcaattgaggtttcttcttcccagatgtctctagctgatgtcaaatcgacaaactctaaccaggaccttcattccttggctctgctcttgacagatcccaccatgggcttcctccctatggactccgaggacctgttcatttttgtcacggatgtcactgagacgacaattccgtgccgagtgacagacccccagctggaggtgacgctacatgagaagaaagtggatatccccctacacgtaccctacgaccaccagcgaggtttcactggtacttttgaggacaagacttacatttgcaaaaccaccattggggacagggaagtggactccgatacttactacgtctacagcctccagggtgagcctcgccttctggcccttcatagaagaatagcccatcagttcactaagtgcacaactctgcatcttattagattctcttgtagcagtgggagggatctagtgtcctcaacattctgaaaaggaaactggctcagagaaaggatggagttggtccacagtcattgtgctctaagggccgggctgggctgcataaggtggggacagaggtgtaggcttggagcccgctgggtttggataccagcttggccattttgcatctggattagtttgcacaaggcacacggtccccaggagcctgactccctacccctctcccctaccataagatgagggtgagattaaggtgcttagcgtgtgaaaaatgcttggtaaatttagattcccagaagactggatttgggcttccagatttggctatctcattgtcagctccatgaaggaagaggttcgtctgtgcgttctctcctctagccccagtgtctaggacagtgtttgcatataatggtagtttaattattactgatatagactcagtgcatgaagtttttacaatagccgacgtttccccgtgggccacttgcgtttcccaagcctattgctggtggctggctagtgatgacatccttggccctaatccagtctctctgccccactccagtgtcatccatcaacgtctctgtgaatgccgtgcagactgtggtccgccagggcgagagcatcaccatccggtgcattgtgatgggcaatgatgtggtgaacttccaatggacgtacccccgcatgaaggtaatgccgggcaaaggttggaaggcaggctgcacatctcagctcccgccagcttctgatttggggccttgactttgcagagtgggcggctggtggagccagtgacagactacctctttggagtgccctcccgcattggctccatcctgcatatccccacggctgagctgagtgattcgggcacctatacttgcaacgtgtcagtgagtgtgaacgaccatggcgatgagaaagccatcaacatctctgtgatcggtgggttccttggactcagtcctctacctcaccctgagctggatcagactctggcgcagacctggggtctatcgcagtattagaccccaatgaagtatagcagtcccacatacaactctgagcccaacctagacttcccaccgagcctagttcattctcaacccctcagtgcagaccttgacagccccgttgccagagtcaacctctgcattagtttgaagttcccttgcaccctgtatataatatagacccagaatagaaaacttcaactccactcccaacctcagctctgaccctaacactatcagttagggtcaaattccatccctgtttccgttccagtcaaagcttgcacttcagctctgttgcctaaagaaaccgtgccctagtttttagaagcccccagaaggtgtttatcttgcatttagtccgcgctggcctccaggaaccctccactagagatgggcaggatgcacattctcattggtgtctgggcataactccgcccacagggcccgcccctaactgttgtaccttccgcagagaatggctacgtgcggctgctggagacactgggagatgtagaaattgctgagctgcaccggagtcggacgctgcgggtggtgttcgaggcttatccgatgccttctgtcctgtggctcaaggacaaccgtaccttgggtgactccggcgctggcgagttagttttgtctactcgcaacatgtctgagacccggtgagcaccagttagtccacttatgttggaagcttcaaagctgccaggcagcctggggccttcagtcaccaacaaacctaggaccttcttgtctgagagcctgttgtgtgatggacacatgccaggtactaggtatgatgctcctgcaggagcaacgcaggctgctctgctcctcctagtgggggtagcagacactgacgacttggccactcagaggtttagttaaccttgtgatgaacagaaccagcaggtaatggccaaaagcaaaaacaccggataggaagaggatttccccaaggctagagatctgcagacaggcaagaatgtgcccctctgatggggataagcttttgagagatgggtatacaccctggcccttcccaagccttcctggtagtttaggggaactggccgtggctgaggactcaggagactgagtggatcctgactctgctgttatcccttgcgcgaccttgctgcgtgaccttggcaagggtatccctccccttggcattctacaggaaggcgaggatgctttaggggttcctgcagttctgatcgcaggtcccctggcctggcctgctccgcaggtacgtgtcagaactgatcctggtacgtgtgaaggtgtcagaagcgggctactatactatgcgagccttccacgaggacgatgaggtccagctctccttcaagctgcaggtcaatggtaagggccacctccctttccctctctcccctccctccctcctccatctctcttccttccttctctgcccatccacccacaggggaggctggacaaagggcccggaacccacgaggctacattttagacggttgatctggcatgttccctctctgggcctcagtttccccagatgtagaaggtgactgtcagactgtactggagcgcccccaaatctgggccatttatgtattgatggtacaattttacttctcacacacaatctctactctgctgagtggtttcaatatggcagtctgttcagagttctacctgctatgatttgcatcctcataggggaagagaaatagaaaaggaggagtttccacagaaaacgaagaaaggttagaaagtaacatgaaactgtagtgggtggggaaggagatagatggatagatagatagatagatagatagatagataagatagatgatagataaatagataggtaatagataagttaaatgataggcagttgatctggcacatcccctctctggggatgtagatgattgatagatagataatagatagatgattgatagatagatgatagaaagatgataggtaaatgatagatacaaagatgatagataatagactgatgatggatagataatagataaattatagatagatgatagatagatagatagatagatagatagatagatagatagatgatcagggttagccttgttctgcaggtgacatttgtgagacttgaaggagggagggcattggacaagtgggtattagtggaaaggacactccagatcatgtgtcaccccttgtcacattgccagagaaataggaggaagttgggtgtggccagatcagagggcgctggcatatatgggggggcatgaggttagggcagaaatggaggggttggagggggtagtcgttgggtaagagcttgtggctcggtatagactacagctccatacaaggcggctttggcttctgttgggactgacaggaagggctatgacagggactggagcagagaaggacatgataaccacttaatgttttgtcaattcgctttctaaaaataaatgtattttgaaagacaaatttagcatctcaattgtagatggaaactcagtgtcatatgccataaatataaaaaacactcaaatacattcagagaaaacaaaacagtgcctagcttcatgggcttggctgccccggctcctggcctgttctctctttgaagagcagttctcagagggatgttaaagactgactctgagccttgccctttgatgtgccccaaaggaacctgtcactttcacactgggactcctagtgtctgaggctcacctgccatcccctgcctggggggagggaggtcaggacaaagaggacaggacactctggagggcatcctcctgacagcctttccagtgctctgttctgatcacctcacttcctgatcctgctctctgattgtccagtccccgtccgtgtgctggagctgagtgagagtcaccctgccaatggggagcagacaatccgctgtcgtggccggggcatgcctcagccaaatgtcacctggtctacctgcagagacctcaaaaggtgagcacaccttgacgccaagcctcccacaatagacacagctgcctagaatgcacaggtagggtaatctagaccggcctctgcacctgagaggtctaagccacatcttagaccagtcctctgccttccgggagataccgtgactaacctaaatttctccttttcttactgagccatcctcaacccaggaaggagcagggtctggctcccagaggtgtctaattcacccagtgaatgttttgtacctttgaccagagctagatgtaatatagtgtatagagttcagggtttgcctttctatccttgaaggtccaataggcaaattttgccgtttaggagtctcagttctagagtgggagcgccctctgctggttgatctaggcagcacagtaggaacctgcttaaggagcaagcactgggaaatcaagcctattctttggaccctgcttcaagtcttactttccctcatttgcagaggggaaattaagagagcctgcaagccagtccttttgtgtttcctagtaggtgtccacgaaaactgtcacccacacccttggggaatagttccaaggaggagagccagctagaaacgaatgtgactttctgggaggaagatcaggaatacgaggtggtgagcacactgcgcctgcgccacgtggatcagccactgtccgtacgctgcatgctgcagaactccatgggtggagattcgcaggaggtcaccgtggtcccacattgtgagtgccccacctgtggatggctctgatgactctcaccccttccttgatcccgccgtactgagcctgaatccccaaagcaggccaagtcggcatactcacaagcccatgggaacattacaaaaacctaccagagtacgttcctatgcacacacgcaaaatatgacgtcggcccaggtgcacaaacacaactctaaacaccacaaacatgaaatgcattgactctcgtgtgcagaaggtgaactggtatgcacgatgcgatcctgggactcaggtgcacactcttcatgtgtacatttgcgctgtgctgaggaccttcagaatacatgcatgttacagaatagcatgttagcatctactcaagcatgtccagtgctgctcatgtatgtaaaactgcagaatatatttttgtgagccgtgtgtatgagcctgctcaaatctaagacttgtatgtaaatccacaaaatgaatgacatgtacatgtgggagtgcagtccccatgtatgtgtataaaacacgcatgtatgattcctgtgcatgtgcgaaaactggcacggcgcatgtctgtactcacataattgcagcatatgaaacataccaaagcacttgagcacaactctgtatacatacactccagacaacgtgtgaacattagtgggcacacacacatgtacaagtactgcacctttgaacagtgcctgccagagtccagatgtgtgtctttctcccacgcatccctgcctgcacctctgtgtgcacatttcatcattagcatcattcagtaagtgatggggacccaaactcgctaggggacagaggtcgatgggacaatccagagtggggaggcagaccaggagtaaaccatcccacacaggatcgctgcttccagggaaaaggccctgagaaagaagaggccctgtgccaaccatggagttgaggaagtatcccctcaaaaaggaagttttacatcaaacgctgcaagatgagtaggtgttagtcagcctgtgagggatgtggaaaagcctagtggctgagtgggttctgagaaattaaagcaaacaagtctggctgcagggcaaactgtgtggatttggggcaggacaggggagagggagggaagtggtaaggaatggggctacaggatgcagaatacagatacaggatacagatacagacgtcagagcaagcagagcctcaaagagcattttgtacacaatcagacacagacacaagtgcacatgcacacaaacacagagacatgcacacatccacacagatgcacacacacccagaggtatccacagactagtacatgtctgcctatgcacatgcctgtcacctgcccttagaagaaggatgaacttttaaaacatccttactggggctggagagatgtctcagaggctaggtgcacttgctgttcttttaaaggacctgagttccattcccagaacccacatcaggtggcttacaacccaacacctgtagctccagatcccatggatcttctacctactggtctccatcaacatccacacatgtggaattcagccatacaaatgcacacatatatagatacaaaaatatataagaaatgtattgattgctgtgggcatcacggatccttttggacttgctctgccaagcacataagtccttactgtctagatattaaaaaaaatcaaatgtcctattcccccatactctcatccatgcacacatatccatgagcaagtgggcacagcggaattgtgcagcctgacatgtagactcactctgagcctgagtaaatgcagaagaaaagtcatgtgtgacgcctgcacaggacaccgtgtgctgttacacagagacccaggatgactctgatgggtccctggagggtgcaggcttcctttgtaagaccagggtgcgggggatgtcaggaagagagaacagaaatgtcagtcagtgaccctaagaaggaaaggatggggctaagccagaggaaggctccctgaggaacagaggagggcaggaagaaacaaattcccagaacacagcagctattgccaagtgggaaaggacaggggttgggggttcagccaggctgactagggaagcagtgcagtgaggctgaagtctcgggctagagagaactcaaggctcagcgaggcctaagtacacctgcatgttcacctcagtgccccaggaggtgcacactgactgcaccaccacacagactagcggtccccaaggtgaggctgagaggaacagacttctttctgggtgtggattcatcagactgctgacgttcagagtcagctctttctggagacactcagtgtctcagccatttggttaggaatgacccaggcatgacagccccaaaaggcatggactcagatgatggggtggcatggcctggtccccagggtgcctgatgctgtaagaggcacaggccatgctcaggaaccagaagagagtttccccagcctagcaggacagtgtagaagccagcctgagcctggttgtcatctgagaggggagtcactgaagggcttataggaaagaccagagtgtggtcccagaggccagctatctaggcagtaagagcttatgtgctgggcagagcaagtccaagggatcagtgatggtcacaacaagatggagagggcagctacccagtgattgtttgcttatagcctgctctggtctctgtcctcagccttgcccttcaaagtggtggtgatctcagccatcctggccttagtggtccttaccgtcatctctctcatcatcctcatcatgctgtggcagaaggtaagcctgtgggtgcagggtggtacccatattccctcttggtgtcacacaatccgacccaaaaggcataacatggagctcagctgggggctgacttggagcatcattgagtctccagttccctcagtccctgctgggctggcatggtctggtgcaattggtccagcactcctgacccctgctctttcctctgcctaggtccttccagctcaactcagtcctggggcaaatggtgctttgtgggtggactatcatggcaccaggattctttcagctcttatccacagagactcccatgagtcacaagaatgcaatctgaccccaagaatctgtttcaacactctattctgacatttcccccctctgtagctccaaacacttaagattcctgaattgggactttagtcccccttcatcttgtcattataagattccaatcctatgactccaagatcctaagatgtccacatccaaaggctgtatgtatccttttgagatcccacagagacagagttgacatttggaatctgtcctaccttatgctatgttcagggtaacctactcgtcccgtctgaggagtaactggagttcagagagaagctggtgaagcagctgtcagttcctctctagaggctgcgtcctcagggtttctcagtcacactttccacccctggggcccctgagtgccaactgcctctgagctcattgagaccttggttttgctagccattcattgcatcactttcaaacatccctgtcctcgctggatgcccgagtctcttgtctcatctgccatctaaaggtctggacctgataggctcaaggccaaagatgccctctgacagtctcatctgttattggtcttgtcctgcagaagccacgctatgagatccgatggaaggtcattgagtctgtgagctctgacggtcatgagtacatctacgtggaccctgtgcagttgccttacgactccacctgggagctgccacgggaccagcttgttctgggtcagtcctaagaggtgttaagcagcagtgggcacactcagatttgctcccatcatggttgctactagctaaggcatagagctgatatcttgcatcctctggatctcactatcctttctatatggtgaagataaggtgaccccatagcaccaaaactcagggatcccaagactgatatgggaccccttcaggtcaaagaggaagtcctttggatgtaggccagggagtctgaggcaggtgcaaaggagttgtgcgtgtccctaagagacaggaggtctttcagggactacaggggaggcagatagcatgcaggatctagaggagacccagaggatgggaaacttcccaaggggagcacagtagggcggttggagggatgtggagggtgatctaagggaatattccccaacctaaatgggaaatgggatgaagcttgaagctttagcttccaggagctgagggtctctatgcatcctaggacgcactcttggctctggggctttcggacaggtggtggaggccacagctcacggtctgagccattcgcaggccaccatgaaagtggctgtcaagatgctgaaatgtgagtccacccgccccttcttcacacccgaggcctcactcggtccctcccttccctgggctttttgtttcttctgaaggagcctggccctgaggttgtgggaccgaagggtgcttcttcctccttctctccccgcctcccaccttcttccctctctaatacagtccaccctaggacactggtggtgtgacaggatggggcagaggaagcagagtaggccctggcagggcctctataccacctcagtggcccacccaggctgagtccctctcccccctccagcgacagccagaagtagcgagaagcaagccttaatgtccgagctgaagattatgagtcatcttggaccccacctgaacgtggtcaacctgctgggggcctgcaccaaaggaggtaccgaacccacaccctggaggattctggggctcctctctttcctgttctccctcagtccaccagcaacacaggacactccagcagaatgtccacacacctgccgctcagcgttcttattgcactgtcctagatggacttagtttcaggatctcagaatcacaactccttcatgatgaagagattcttcaggccgctagttcctgcagctttagaattcaagtcttttatgactcttccttccttccttccttccttccttccttccttccttccttccttccttcctccctcccttccttccttccttcttttttctctctttctttctctctttctctctctctttctctctttctcattcttccttctctccttttttccttccttcctgtctccttcctgtctcctttctttctttctttctttctttctttctttctttctttctttctttcttattctctctcttccttcctctctctctcttccttcctttctttcttccttccttcctttctttctttctttctttctttctttctttctttctttctttctttctttctttctttctttcttattctctctcttccttcctctcttccttccttccttccttgcctgcctgcctgtctgcctgcctgcctgccttcatgatgaagtcttgcctgtatgtcagtgttcctgtgtgtgtgtgtgtgtgtgtgtgtgtgtgtgtgtgtgtgtgtgtgcgtgcatatgtatgtgtgtctggtacttgagaaggccagaagaggtcatcagatcctctgaaactggagtgacagatggttgtgagccagtgggtaggtgctcggtattgaaccaaggttgtctgcatgaacaagtgctcctaacagctgaccatccctcccacctcctttttcatatttccacaatacattttgaaaaccgtgagaaagtaacagagcccatccatgtactaaccaggaactggctttgtttacatcagtgttggaagtcattctgccaactgcgatgatctgagggcctggttacccactgggctgtcaacatcgtaataatcatgaagttattgccctttgcagctgcttgttgtgagatctgggattttcctcggtgttgtgtaatcagcctaaatacagaagtacattgcgcatggactgttgtctgtgcttgcaatgaccgtatttcttttttttttctttttttaaaaaaagaattcttgtatctttattcatgagggttctacttctcttataggccttttatatttctatcaaggcaaaacatacttcattataaataaaggaggcagctccctccactttctcaagtaattgtttaaaactaatattggaggagctagagaaagctcccaaggagccaaaggggtctgcaaccctgtaggtggaacaacaacatgaaccaaccagtacccccggagctcgtgtctctagctacatatgtatcagaagatggcccagtcggccatcattgggaagagaggccccttggtcctgcaaaccctatatgcctcagtacaggggaacaccagggccaagaagtgggagtgggtgggcaggggagtgggggcgggggaggagagtctgggggactcctgggatagcatttgaatgcaaatgaagaaaacacccaatcaaaagtataaattaatcaaaaacaacccctaatattatattcatacttaaatgtttgacagaattcaccagtaaagatattagacttagaattttcttgggattttatttggggaacagtagagagaccgaatctatgtacgaattgtcctggaacttgctatattcaccaaaatggccacaaactcactgagacatgtctgctgaaagctggaattagtattgtgcaagccccagcttggaagatttttttttaattttttaaaattaggttattttcttcatctacacctccaacgctatcccaaaagtcccccacaccctcccccacactcccccacccacccactcccaccccctggccccggcgttcccctgtactgaggcacataaagttcacaagaccaatgggcctctctttccaatgatggccgactaagccatcctctgatacatatgcagctagagacacgagctctggggggtactggctagttcacattgttgttccacctatagggttgcagaccccttcagctcactgggtactctctctagctcctccattaggggccctgtgttccatccaatagctgactgtgagcatccacttctgtgtttgctgggccctggcatagcctcacaagaggcagctatatcaggggcaatgaccgtatttcaaaagtgttattttcatctgttagatggctctcagtgcattgaacttaagtgtaatcagcaaattgcactaacagtcacgttcacctgctctatgtagagcagaatccgaaatgtgtaccagtctgaaaacagcagcagcaaccgatatcataggcttgctacatgctgagccctcaaaggcatctcaggggtcttcatgtcaaccccaagggtggatttcagcccctggccaggtggacagaggaaggaccctggagatgaacagcttgcttacaaccacagaggcagggaaacaacccaggtttgcaaggtgccagcatctctgccatcttgctatctgtgtctccacacccaagactctatattggttttgtggtcatgctgggaagactgaggccttcctcagaggctgtccctgagcctgtcctcctgcagggcccatctacatcatcacggaatactgccgatacggtgatctggtggactacctgcaccggaacaaacacaccttcttgcagcgacactccaacaagcattgtccgcccagtgctgagctctacagcaacgccctgccagtggggttctccctacccaggtacgagggaggcagcacccagtgagtgcctgccaggcatatgggcgctccttgtccaggagtccaagatgaaagtatgggcactggggcagtcacttgccagagccagcactctgaccagatagtaatgatgatgatgggtgtgtgtgtcgtctcagtgagccaggctccatcctaagccttctgcagatgtgaccccttgaacccatggaccatccttgtgtcctaggtgtcttgtttctaggtgtcttgtctttaaggatataagggacagagagccaggctcccagccatagctcccctgtcctctccaagccagtctccccagtaccctatgggcaaacccacctctgtttctgatgacttctgatgactgatgttgnnnnnnnnnnnnnnnnnnnnnnnnnnnnnnnnnnnnnnnnnnnnnnnnnnnnnnnnnnnnnnnnnnnnnnnnnnnnnnnnnnnnnnnnnnnnnnnnnnnnnagctctggaaaggtgcacacagaggatgtgagaatgcaccccctcctcccccccccccccgtcctctctgacactggcccatctccttgcaccgcctatttagttctatcactccctgggagctaaggctgtagggagggtgtgtccaggtgaggccttgctgccattctagactgtgcacctcccagccccctgaggtaggtggtgctagagagacgcctctctacagacccacttaacacactggtcctggctgttgcaatcactccttggggggtgtgaactctgagaatagatgttgggtcttttgtcattctggcagccccagggcacagctcagggccacacaggttagttgaaggggtttggttcacagtcattcacactgtatggtgacagacagaggagatcagtgactgaggaaatgaatctacaaatgacaaggccccatgggctcaggctgtacaggggacaggagcaggaagaaaaaaccatggcttttcattatcccattcttttgcctacagccacttgaacctgactggggagagtgacggtggctacatggatatgagcaaggatgaatctatagattacgtgcccatgttggacatgaaaggagacatcaaatacgcagacattgagtcccccagctacatggccccttatgataactatgtcccatctggtaagtggatactgttatcacgcctaaacaggctcatccaatacgcacagcaatgtcttcctttcaaagtccttaatgtaccatagtcttggagcaaccctgggaggaagctagctcatttcattcacgtggagatggaggctggctgcctgcccagtgcttctatgcagtggagccctgtcccaagtcctgtggctggttccagagcacgcacataacgggcaagaaggggagagatggatgaaggtggtctcctagggcctggaggaagatctgagttgacccatggtggtgaatgtcctgagaaacaagcagaagagttttagttagaggtcccagggctaagaccagaggtttttcttgacagtgcacacaatgaaagcagaagagatgggctggagggatagctcagcagttaagagcactgtctgctcttccagaggtcctgagttcaattcccagcaaccacatggtggctcacaaccatctgtaatgggacctgatactctcttctggtgtttctgaagacagcaacaatgtactcacatacataaaatcaataaataagtcttttttaaaaaaagaaagcagaagagatttgggttagacacttaggaatttattctccccagggaacacttagagatttagcagtcactagtattgcctgttcaaatccacaagcctaaagacagggctcttctaagcttatggtacacgcaaagtaacccataaccctctgctctctagcccctgaaaggacctatcgcgccaccttaatcaacgactcaccagtgctcagctacacagacctcgtgggcttcagctaccaagtggccaacggcatggacttcttagcctctaagaacgtatgtatggtcctgatggggcaaggcaaaactgtgaggagagagggcagctagccaaccagagccttccacatgtgtggccccatgagatagctcccgactctctgatggacaagggcattgagaaaccacacacctgggaaggcacacattttttcctaaagtgctgacccagagggtcttcccccacaactgctccttggcttcagctcccctcttccttgatccagtgtgttcaccgagacttggcggccaggaatgtgctcatctgcgagggcaagctggtcaagatctgtgacttcggcctggctcgagacatcatgagggactcaaactacatctccaaaggcagcgtgagtgacttcaccatccgtggggttgtccccaggtgcctctgtccctgggtacaggttccctccaatccatgtggccacacttcagtatgggaccactgcttactttttgtgccagtagagatgccagtgctgctcagctatgagcagaggctggacaaagagccacctagctttgtgcacagtgggaaaagatggggagagggtcaggaccacatgtcacagtgggggctgaatcaggaccagctacagtgggccccaggtgagcaggaagaggtatagacagagatgtaaggtgaacagaggagtaacccaaatgatatggtaagacaggtcttgaagtccagtgttagaataactacagaccccagagaccttgggcatgtccctggctacccacttcaaggcatagcacactcttggggcttcccccagggttacaggctaccaggtctctagacagtgagttaggaaacagcttcccaatgctctggccaggagtgtgcttagagccttagagtggagtgagaaggaattggtgtgggagctgctgagcctcctccttcccaggggtggactggctagagactctatgtgctcagtgcctgtcttcacttcttcagaccttcctgcctctgaagtggatggccccagagagcatcttcaacagcctctacaccactttgagtgatgtctggtcttttgggatcctactctgggagatcttcacactgggtgagccacttcttcccctagccccaagctatgcaccagagcatctacccttccacttctatctccctcctgattgctcctcggcctggaagtagaggactgtgggacagatgctcagacatgagccaggacttaggggcaagtccagacagtgccactcttctaattctaaggctttggcaagtcctctgccaactctgggtctttattttcccatccaagtatcaaagggattagacatatcaaaaacatgcttgaagccgctgtaatggtgtatagctgtaatctcaggatatgggaagcaggaaaatggaaagtttgaggccagcctgagctacctagactccatctttaaaaatcaaagagaagaaacacaaacacaaacaaaccctgcttagatatctattgcttctctgtttccatctctgtgtggagtctattttccaatgccaagggcattgtgttctcatatatgccaagacagtatagcatgcctgagaggacaccttgccactccccacatcctgagacagtatgtccctgtctctgttccatgacaggtggcaccccttacccagagctgcccatgaacgaccagttctacaatgccatcaagaggggctaccgcatggcccagcctgctcatgcctccgacgagatgtgagtggaacctagtgcatttgggaggaatttgaggattccaggggggcatgcaactctagttcaaaggttaaatgagtattgctagaactggatcaaggtgttcaaaatggcaccaccaggaagttcggtcccagaccaggtctccactttctctatgctggcttcaaattcaagcctgccctgctcatgtggctaccattagcaccacaataccttactgcttgcattgctccagcaaaagaccagcgctgagcttttaagggctcagtttggtcacataccatcagaactggtgctgagttgggaggatgagaatccctattggccaaattcaggttacagtgttcttccccatgatgccttagactctgctgaatcatgtgaatgggggaagctgggaagacttcccaagagatcagtaagaagcaatgataggataaacaaggcgtcgggagctcctcccccagcatctctccctgcaccttgttctgaggctgtgcactccacagccctgcctctgcagaggggactctgactctctctctgcctccctcagctatgagatcatgcagaaatgctgggaagaaaagtttgagactcgaccccccttctcccagctggtgctgctcctggagaggcttctgggtgaaggctataaaaaggtatgtggagccaaggcagggtggaagacagagttctcatccaaaccctgtgcagttggcttgatgtaatgtgctgggatttggggaggaaatgatcctcacccaggctctgggcctgggtttctctgctggtgctagaaagggttgagccagaactacttatttattctaaaagaatcaaaaaatgtggaagctgattgatctgtccaagagaggtgcagtagataatcctgtctgtcaaacctgtgaaccctgacaacactggggttccttcggaagtgtgagcaaccccagactctctggaacccgcacagcaactacttgaaccttgttccaggttcacgcaagtctgacaggacgagtctgtccggacctcagcttcttgtcttcccatctggggtggtcctagggagatagagacaaagagaagccatcactgtttcattgcaagggacactgacctgcagccacaacaggaggttgtgggagaccatagtagtatgggagcccatatctgtttagtctgaagtgggttgggagttagggtcatggtaatctggctaccgtgcctggctactatgcttgactacctgccctccctagggaactctgaacttgtcttgggatgccaggtaggaaggctgctcaccagggcagctttgtgtaggacctcattctctgagcataaacgagggtatagggtttctaagacattgcccatcaaactcctttttcattccctgtcctacggagcagaagtaccagcaggtagatgaggagttcctgaggagtgaccatcctgccatcctgaggtcccaagcccgctttccggggatccacagcctccgatcccctctggacaccagctctgttctctacactgccgtgcagcccaatgagagtgacaatgactacatcatccccttacctgaccccaagcctgacgttgctgatgaaggtctcccagaggggtcccccagccttgccaggtagccaccctgaccctttggccccaggcactcatgcatatagtgcgtgtgttcatgtgtgtgtgtgtgtgtaaccagacttgccacagaaggactgtcagctagctagagtaaggactaactcttgccagtggctagtaaggctgaagtttactcagcacttagagctgcaggtaagaaaggcagactggaaagaaacaagttattctagaacccatttgcaagatagctcttccttttaaggacatcacaactacaggaccctttctaggtcttgtgctagtcccgaggacaaagaggaaacatttagcatttcccaactgttacttggggttatggctgcccttgacaccatatccaggtagcctgtttgtagaagatggaagagctgcaaatccaggttagaactcagacaggggaagggagacatggtctgccttgggttatagtagagcccactaagggatgcattctggggagccctatgcctttcctggattgatgttcagccagagagggaactccccaaaatcaagacctagctcatggatgagtggtaggagacacaggctggcttctgtttctagcccgtcactatgaaacttggataggccttgtctctgagggcctcagtttctctgtaggaactagcagtgcataaaggcctttgcaggccctgaaggtctcatttgcctctcgttaatgagacaggcattgtcaggcgggcatggggtgggtgtggggctgggaggtgggtaggggtggtgttaggctgagcagggtcaactcaagannnnnnnnnnnnnnnnnnnnnnnnnnnnnnnnnnnnnnnnnnnnnnnnnnnnnnnnnnnnnnnnnnnnnnnnnnnnnnnnnnnnnnnnnnnnnnnnnnnnnnnnnnnnnnnnnnnnnnnnnnnnnnnnnnnnnnnnnnnnnnnnnnnnnnnnnnnnnnnnnnnnnnnnnnnnnnnnnnnnnnnnnnnnnnnnnnnnnnnnnnnnnnnnnnnnnnnnnnnnnnnnnnnnnnnnnnnnnnnnaaacttgagagcctggtcttcccgctctcaagttctagttccctgtactcacccgctgtgtgtggtggagccatgacataacctctctgagctgtgctccccttggggtacaggcctctcagtgtgtaaagacaacacacggaaacctcttagataatgctgttatcttcttggggtttccccggttcctttctgacttattcccttcctctagttccaccttgaatgaagtcaacacttcctccaccatctcctgcgacagtcccctggagctccaagaagagccacagcaagcagagcctgaggcacaactggagcagccacaggattcaggctgcccaggacctctggctgaagcagaggacagcttcctgtaggaactgacatcactccattttgcccgaatctcccttctgcctcccagaacccaaccctcttggcctggcctggcctggcctggcctcccagcagctacactgccacaagctgtcccctcgaggaaagcccttggtttgcagcactcaaggtccagggacccagcttagcttaggaggcaagagaactctgcctcgggaaggtcatgggactctgaaccagggttcctccaggggactcagtttccccaaatgtaagaggaagagttgtacttggctacaggacaggtctggagcccggattcctgcagaaatccacgactgtacggtggtgtgttcatatcctcctgtgtagcagctgcccctcagctggattgctctactttgatcttcctaagaatcaggcaaggacctggtgtctggctcctggccaaactgtaaccagccttggacaaggtcttttcattcagagcccacctcccctggtcttagctttcccaggcccgagctggtctggggccagccatgcttaatgaatgctgttagtggtgaaggtaggccgagtacagaatgctctggcctgcagccctgcctgggcactcagggcacacctggccacaggaagcacccactcctttcagccccaccagtcctagaatagtccccaggtcactctcagctgacccacccaccagagtctgcagggccattgtccacgcctgtgataggctaagcatctgcctgaagtgtgtacctaccactaggagccctggctctgcgctggacctgctatgagaccttgggggctttccttgttctctctggggaccagttttctttcccctttgaaaagcaagttggacacatagactctgagtaccctgtcaatagtacaattcttgtatgttctgggagtttgctcttgtcccgaggaagcagggtcaagtccttaaactgatctttctaggggtcagctgagctcttggaagatccctgatacacttcacactctgggggttcaggaaccgagcctcttcttcaagtctccaagtgcaactgcccagaccttgacttggagtgacagtgagtgtcctaggaaacccccttacagctgtcctgaggacacagaagagaccacgagacccttttttcatatcatgaagccagcaagagtggcagagaaggcaagccaggttacctcgggccactgtcaccagcagcgtgtggacagacatgatggacagtgaggacagacgtcccatgcaggacaagagacttgagatgggcaatgagaggaagatgctgacgggattaccacctcaactgccagctgcccccgtccccagggagcaccccacagaaacagttctaaccctgaaccaatgaacattgcaagtgcctggggactagggagtggggggaagtcagcctttctggggaccctccctgctagctggttggctagctggcatctccccgcttggagcagcagaggctggggagtactgctcacaatggtaccaaagatagaatcacctaggtttacaagtacttgtaggactcgagataacccacatttagacaccggaagtgctattttatatgctgttaagttttcctatctgtactttttttttaaatgggaaagattttaatattaaacttggtgcttctcactg

SEQ ID NO: 66 - DNA, 3739 bp, Mus musculus
ctcagggttttccgcaatcaggccagcccttctactgctgtccgttttttgggtccagcaaaataacagaagacagcgaggtggacttcctggagggggtgatagctcacatcagaagccatctgtagcccggacaccatggggcttccaggagtgataccagctttagtcctcagaggccagttgttgctgtccgtgttatggctcctgggaccgcagacctcccggggcctagtcatcacgccccctgggccagagtttgttctcaacatctccagcacctttgttctgacctgctcgggctcagctccggtgatgtgggaacagatgtcccaggtgccctggcaagaagcggccatgaatcaggacggcaccttctccagtgtgctgacactgaccaatgtcactgggggagacactggggaatacttttgtgtctacaacaactcactagggccggagctcagtgagaggaagcgtatctatatctttgtgccagatcccaccatgggcttcctccctatggactccgaggacctgttcatttttgtcacggatgtcactgagacgacaattccgtgccgagtgacagacccccagctggaggtgacgctacatgagaagaaagtggatatccccctacacgtaccctacgaccaccagcgaggtttcactggtacttttgaggacaagacttacatttgcaaaaccaccattggggacagggaagtggactccgatacttactacgtctacagcctccaggtgtcatccatcaacgtctctgtgaatgccgtgcagactgtggtccgccagggcgagagcatcaccatccggtgcattgtgatgggcaatgatgtggtgaacttccaatggacgtacccccgcatgaagagtgggcggctggtggagccagtgacagactacctctttggagtgccctcccgcattggctccatcctgcatatccccacggctgagctgagtgattcgggcacctatacttgcaacgtgtcagtgagtgtgaacgaccatggcgatgagaaagccatcaacatctctgtgatcgagaatggctacgtgcggctgctggagacactgggagatgtagaaattgctgagctgcaccggagtcggacgctgcgggtggtgttcgaggcttatccgatgccttctgtcctgtggctcaaggacaaccgtaccttgggtgactccggcgctggcgagttagttttgtctactcgcaacatgtctgagacccggtacgtgtcagaactgatcctggtacgtgtgaaggtgtcagaagcgggctactatactatgcgagccttccacgaggacgatgaggtccagctctccttcaagctgcaggtcaatgtccccgtccgtgtgctggagctgagtgagagtcaccctgccaatggggagcagacaatccgctgtcgtggccggggcatgcctcagccaaatgtcacctggtctacctgcagagacctcaaaaggtgtccacgaaaactgtcacccacacccttggggaatagttccaaggaggagagccagctagaaacgaatgtgactttctgggaggaagatcaggaatacgaggtggtgagcacactgcgcctgcgccacgtggatcagccactgtccgtacgctgcatgctgcagaactccatgggtggagattcgcaggaggtcaccgtggtcccacattccttgcccttcaaagtggtggtgatctcagccatcctggccttagtggtccttaccgtcatctctctcatcatcctcatcatgctgtggcagaagaagccacgctatgagatccgatggaaggtcattgagtctgtgagctctgacggtcatgagtacatctacgtggaccctgtgcagttgccttacgactccacctgggagctgccacgggaccagcttgttctgggacgcactcttggctctggggctttcggacaggtggtggaggccacagctcacggtctgagccattcgcaggccaccatgaaagtggctgtcaagatgctgaaatcgacagccagaagtagcgagaagcaagccttaatgtccgagctgaagattatgagtcatcttggaccccacctgaacgtggtcaacctgctgggggcctgcaccaaaggagggcccatctacatcatcacggaatactgccgatacggtgatctggtggactacctgcaccggaacaaacacaccttcttgcagcgacactccaacaagcattgtccgcccagtgctgagctctacagcaacgccctgccagtggggttctccctacccagccacttgaacctgactggggagagtgacggtggctacatggatatgagcaaggatgaatctatagattacgtgcccatgttggacatgaaaggagacatcaaatacgcagacattgagtcccccagctacatggccccttatgataactatgtcccatctgcccctgaaaggacctatcgcgccaccttaatcaacgactcaccagtgctcagctacacagacctcgtgggcttcagctaccaagtggccaacggcatggacttcttagcctctaagaactgtgttcaccgagacttggcggccaggaatgtgctcatctgcgagggcaagctggtcaagatctgtgacttcggcctggctcgagacatcatgagggactcaaactacatctccaaaggcagcaccttcctgcctctgaagtggatggccccagagagcatcttcaacagcctctacaccactttgagtgatgtctggtcttttgggatcctactctgggagatcttcacactgggtggcaccccttacccagagctgcccatgaacgaccagttctacaatgccatcaagaggggctaccgcatggcccagcctgctcatgcctccgacgagatctatgagatcatgcagaaatgctgggaagaaaagtttgagactcgaccccccttctcccagctggtgctgctcctggagaggcttctgggtgaaggctataaaaagaagtaccagcaggtagatgaggagttcctgaggagtgaccatcctgccatcctgaggtcccaagcccgctttccggggatccacagcctccgatcccctctggacaccagctctgttctctacactgccgtgcagcccaatgagagtgacaatgactacatcatccccttacctgaccccaagcctgacgttgctgatgaaggtctcccagaggggtcccccagccttgccagttccaccttgaatgaagtcaacacttcctccaccatctcctgcgacagtcccctcctggcctggcctggcctggcctcccagcagctacactgccacaagctgtcccctcgaggaaagcccttggtttgcagcactcaaggtccagggacccagcttagcttaggaggcaagagaactctgcctcgggaaggtcatgggactctgaaccagggttcctccaggggactcagtttccccaaatgtaagaggaagagttgtacttggctacaggacaggtctggagcccggattcctgcagaaatccacgactgtacggtggtgtgttcatatcctcctgtgtagcagctgcccctcagctggattgctctactttgatcttcctaagaatcaggcaaggacctggtgtctggctcctggccaaactgtaaccagccttggacaaggtcttttcattcagagcccacct

SEQ ID NO: 67 - protein, 1150 aa, Mus musculus
MGLPGVIPALVLRGQLLLSVLWLLGPQTSRGLVITPPGPEFVLNISSTFVLTCSGSAPVMWEQMSQVPWQEAAMNQDGTFSSVLTLTNVTGGDTGEYFCVYNNSLGPELSKRIYIFVPDPTMGFLPMDSEDLFIFVTDVTETTIPCRVTDPQLEVTLHEKKVDIPLHVPYDHQRGFTGTFEDKTYICKTTIGDREVDSDTYYVYSLQVSSINVSVNAVQTVVRQGESITIRCIVMGNDVVNFQWTYPRMKSGRLVEPVTDYLFGVPSRIGSILHIPTAELSDSGTYTCNVSVSVNDHGDEKAINISVIENGYVRLLETLGDVEIAELHRSRTLRVVFEAYPMPSVLWLKDNRTLGDSGAGELVLSTRNMSETRYVSELILVRVKVSEAGYYTMRAFHEDDEVQLSFKLQVNVPVRVLELSESHPANGEQTIRCRGRGMPQPNVTWSTCRDLKRCPRKLSPTPLGNSSKEESQLETNVTFWEEDQEYEVVSTLRLRHVDQPLSVRCMLQNSMGGDSQEVTVVPHSLPFKVVVISAILALVVLTVISLIILIMLWQKKPRYEIRWKVIESVSSDGHEYIYVDPVQLPYDSTWELPRDQLVLGRTLGSGAFGQVVEATAHGLSHSQATMKVAVKMLKSTARSSEKQALMSELKIMSHLGPHLNVVNLLGACTKGGPIYIITEYCRYGDLVDYLHRNKHTFLQRHSNKHCPPSAEKNALPVGFSLPSHLNLTGESDGGYMDMSKDESIDYVPMLDMKGDIKYADIESPSYMAPYDNYVPSAPERYATLINDSPVLSYTDLVGFSYQVANGMDFLASKNCVHRDLAARNVLICEGKLVKICDFGLARDIMRDSNYISKGSTFLPLKWMAPESIFNSLYTTLSDVWSFGILLWEIFTLGGTPYPELPMNDQFYNAIKRGYRMAQPAHASDEIYEIMQKCWEEKFEWPFSQLVLLLERLLGEGYKKKYQQVDEEFLRSDHPAILRSQARFPGIHSLRSPLDTSSVLYTAVQPNESDNDYIIPLPDPKPDVADEGLPEGSPSLASSTLNEVNTSSTISCDSPLLAWPGLASQQLHCHKLSPRGKPLVCSTQGPGTQLSLGGKRTLPREGHGTLNQGSSRGLSFPKCKRKSCTWLQDRSGARIPAEIHDCTVVCSYPPV

SEQ ID NO: 68 - DNA, 5111 bp, Mus musculus
ctcagggttttccgcaatcaggccagcccttctactgctgtccgttttttgggtccagcaaaataacagaagacagcgaggtggacttcctggagggggtgatagctcacatcagaagccatctgtagcccggacaccatggggcttccaggagtgataccagctttagtcctcagaggccagttgttgctgtccgtgttatggctcctgggaccgcagacctcccggggcctagtcatcacgccccctgggccagagtttgttctcaacatctccagcacctttgttctgacctgctcgggctcagctccggtgatgtgggaacagatgtcccaggtgccctggcaagaagcggccatgaatcaggacggcaccttctccagtgtgctgacactgaccaatgtcactgggggagacactggggaatacttttgtgtctacaacaactcactagggccggagctcagtgagaggaagcgtatctatatctttgtgccagatcccaccatgggcttcctccctatggactccgaggacctgttcatttttgtcacggatgtcactgagacgacaattccgtgccgagtgacagacccccagctggaggtgacgctacatgagaagaaagtggatatccccctacacgtaccctacgaccaccagcgaggtttcactggtacttttgaggacaagacttacatttgcaaaaccaccattggggacagggaagtggactccgatacttactacgtctacagcctccaggtgtcatccatcaacgtctctgtgaatgccgtgcagactgtggtccgccagggcgagagcatcaccatccggtgcattgtgatgggcaatgatgtggtgaacttccaatggacgtacccccgcatgaagagtgggcggctggtggagccagtgacagactacctctttggagtgccctcccgcattggctccatcctgcatatccccacggctgagctgagtgattcgggcacctatacttgcaacgtgtcagtgagtgtgaacgaccatggcgatgagaaagccatcaacatctctgtgatcgagaatggctacgtgcggctgctggagacactgggagatgtagaaattgctgagctgcaccggagtcggacgctgcgggtggtgttcgaggcttatccgatgccttctgtcctgtggctcaaggacaaccgtaccttgggtgactccggcgctggcgagttagttttgtctactcgcaacatgtctgagacccggtacgtgtcagaactgatcctggtacgtgtgaaggtgtcagaagcgggctactatactatgcgagccttccacgaggacgatgaggtccagctctccttcaagctgcaggtcaatgtccccgtccgtgtgctggagctgagtgagagtcaccctgccaatggggagcagacaatccgctgtcgtggccggggcatgcctcagccaaatgtcacctggtctacctgcagagacctcaaaaggtgtccacgaaaactgtcacccacacccttggggaatagttccaaggaggagagccagctagaaacgaatgtgactttctgggaggaagatcaggaatacgaggtggtgagcacactgcgcctgcgccacgtggatcagccactgtccgtacgctgcatgctgcagaactccatgggtggagattcgcaggaggtcaccgtggtcccacattccttgcccttcaaagtggtggtgatctcagccatcctggccttagtggtccttaccgtcatctctctcatcatcctcatcatgctgtggcagaagaagccacgctatgagatccgatggaaggtcattgagtctgtgagctctgacggtcatgagtacatctacgtggaccctgtgcagttgccttacgactccacctgggagctgccacgggaccagcttgttctgggacgcactcttggctctggggctttcggacaggtggtggaggccacagctcacggtctgagccattcgcaggccaccatgaaagtggctgtcaagatgctgaaatcgacagccagaagtagcgagaagcaagccttaatgtccgagctgaagattatgagtcatcttggaccccacctgaacgtggtcaacctgctgggggcctgcaccaaaggagggcccatctacatcatcacggaatactgccgatacggtgatctggtggactacctgcaccggaacaaacacaccttcttgcagcgacactccaacaagcattgtccgcccagtgctgagctctacagcaacgccctgccagtggggttctccctacccagccacttgaacctgactggggagagtgacggtggctacatggatatgagcaaggatgaatctatagattacgtgcccatgttggacatgaaaggagacatcaaatacgcagacattgagtcccccagctacatggccccttatgataactatgtcccatctgcccctgaaaggacctatcgcgccaccttaatcaacgactcaccagtgctcagctacacagacctcgtgggcttcagctaccaagtggccaacggcatggacttcttagcctctaagaactgtgttcaccgagacttggcggccaggaatgtgctcatctgcgagggcaagctggtcaagatctgtgacttcggcctggctcgagacatcatgagggactcaaactacatctccaaaggcagcaccttcctgcctctgaagtggatggccccagagagcatcttcaacagcctctacaccactttgagtgatgtctggtcttttgggatcctactctgggagatcttcacactgggtggcaccccttacccagagctgcccatgaacgaccagttctacaatgccatcaagaggggctaccgcatggcccagcctgctcatgcctccgacgagatctatgagatcatgcagaaatgctgggaagaaaagtttgagactcgaccccccttctcccagctggtgctgctcctggagaggcttctgggtgaaggctataaaaagaagtaccagcaggtagatgaggagttcctgaggagtgaccatcctgccatcctgaggtcccaagcccgctttccggggatccacagcctccgatcccctctggacaccagctctgttctctacactgccgtgcagcccaatgagagtgacaatgactacatcatccccttacctgaccccaagcctgacgttgctgatgaaggtctcccagaggggtcccccagccttgccagttccaccttgaatgaagtcaacacttcctccaccatctcctgcgacagtcccctggagctccaagaagagccacagcaagcagagcctgaggcacaactggagcagccacaggattcaggctgcccaggacctctggctgaagcagaggacagcttcctgtaggaactgacatcactccattttgcccgaatctcccttctgcctcccagaacccaaccctcttggcctggcctggcctggcctggcctcccagcagctacactgccacaagctgtcccctcgaggaaagcccttggtttgcagcactcaaggtccagggacccagcttagcttaggaggcaagagaactctgcctcgggaaggtcatgggactctgaaccagggttcctccaggggactcagtttccccaaatgtaagaggaagagttgtacttggctacaggacaggtctggagcccggattcctgcagaaatccacgactgtacggtggtgtgttcatatcctcctgtgtagcagctgcccctcagctggattgctctactttgatcttcctaagaatcaggcaaggacctggtgtctggctcctggccaaactgtaaccagccttggacaaggtcttttcattcagagcccacctcccctggtcttagctttcccaggcccgagctggtctggggccagccatgcttaatgaatgctgttagtggtgaaggtaggccgagtacagaatgctctggcctgcagccctgcctgggcactcagggcacacctggccacaggaagcacccactcctttcagccccaccagtcctagaatagtccccaggtcactctcagctgacccacccaccagagtctgcagggccattgtccacgcctgtgataggctaagcatctgcctgaagtgtgtacctaccactaggagccctggctctgcgctggacctgctatgagaccttgggggctttccttgttctctctggggaccagttttctttcccctttgaaaagcaagttggacacatagactctgagtaccctgtcaatagtacaattcttgtatgttctgggagtttgctcttgtcccgaggaagcagggtcaagtccttaaactgatctttctaggggtcagctgagctcttggaagatccctgatacacttcacactctgggggttcaggaaccgagcctcttcttcaagtctccaagtgcaactgcccagaccttgacttggagtgacagtgagtgtcctaggaaacccccttacagctgtcctgaggacacagaagagaccacgagacccttttttcatatcatgaagccagcaagagtggcagagaaggcaagccaggttacctcgggccactgtcaccagcagcgtgtggacagacatgatggacagtgaggacagacgtcccatgcaggacaagagacttgagatgggcaatgagaggaagatgctgacgggattaccacctcaactgccagctgcccccgtccccagggagcaccccacagaaacagttctaaccctgaaccaatgaacattgcaagtgcctggggactagggagtggggggaagtcagcctttctggggaccctccctgctagctggttggctagctggcatctccccgcttggagcagcagaggctggggagtactgctcacaatggtaccaaagatagaatcacctaggtttacaagtacttgtaggactcgagataacccacatttagacaccggaagtgctattttatatgctgttaagttttcctatctgtactttttttttaaatgggaaagattttaatattaaacttggtgcttctcactg

SEQ ID NO: 69 - protein, 1090 aa, Mus musculus
MGLPGVIPALVLRGQLLLSVLWLLGPQTSRGLVITPPGPEFVLNISSTFVLTCSGSAPVMWEQMSQVPWQEAAMNQDGTFSSVLTLTNVTGGDTGEYFCVYNNSLGPELSKRIYIFVPDPTMGFLPMDSEDLFIFVTDVTETTIPCRVTDPQLEVTLHEKKVDIPLHVPYDHQRGFTGTFEDKTYICKTTIGDREVDSDTYYVYSLQVSSINVSVNAVQTVVRQGESITIRCIVMGNDVVNFQWTYPRMKSGRLVEPVTDYLFGVPSRIGSILHIPTAELSDSGTYTCNVSVSVNDHGDEKAINISVIENGYVRLLETLGDVEIAELHRSRTLRVVFEAYPMPSVLWLKDNRTLGDSGAGELVLSTRNMSETRYVSELILVRVKVSEAGYYTMRAFHEDDEVQLSFKLQVNVPVRVLELSESHPANGEQTIRCRGRGMPQPNVTWSTCRDLKRCPRKLSPTPLGNSSKEESQLETNVTFWEEDQEYEVVSTLRLRHVDQPLSVRCMLQNSMGGDSQEVTVVPHSLPFKVVVISAILALVVLTVISLIILIMLWQKKPRYEIRWKVIESVSSDGHEYIYVDPVQLPYDSTWELPRDQLVLGRTLGSGAFGQVVEATAHGLSHSQATMKVAVKMLKSTARSSEKQALMSELKIMSHLGPHLNVVNLLGACTKGGPIYIITEYCRYGDLVDYLHRNKHTFLQRHSNKHCPPSAEKNALPVGFSLPSHLNLTGESDGGYMDMSKDESIDYVPMLDMKGDIKYADIESPSYMAPYDNYVPSAPERYATLINDSPVLSYTDLVGFSYQVANGMDFLASKNCVHRDLAARNVLICEGKLVKICDFGLARDIMRDSNYISKGSTFLPLKWMAPESIFNSLYTTLSDVWSFGILLWEIFTLGGTPYPELPMNDQFYNAIKRGYRMAQPAHASDEIYEIMQKCWEEKFEWPFSQLVLLLERLLGEGYKKKYQQVDEEFLRSDHPAILRSQARFPGIHSLRSPLDTSSVLYTAVQPNESDNDYIIPLPDPKPDVADEGLPEGSPSLASSTLNEVNTSSTISCDSPLELQEEPQQAEPEAQLEQPQDSGCPGPLAEAEDSFL

SEQ ID NO: 70 - DNA, 42016 bp, Homo sapiens
aggctgccagcagccagcagtgactgcccgccctatctgggacccaggatcgctctgtgagcaacttggagccagagaggagatcaacaaggaggaggagagagccggcccctcagccctgctgcccagcagcagcctgtgctcgccctgcccaacgcagacagccagacccagggcggcccctctggcggctctgctcctcccgaaggatgcttggggagtgaggcgaagctgggccgctcctctcccctacagcagcccccttcctccatccctctgttctcctgagccttcaggagcctgcaccagtcctgcctgtccttctactcagctgttacccactctgggaccagcagtctttctgataactgggagagggcagtaaggaggacttcctggagggggtgactgtccagagcctggaactgtgcccacaccagaagccatcagcagcaaggtaagtgctggaaaaagtgggaaccccagccccatgccctgtccctttgccctaacctgcatctcttcgagtaggtaaaaaaaaaaaaaaaaaaaaaaagggaagatatttttaacaaaacaagatgagaggaggctgggagactgtgggtgatgtcagggatggaggagccagttttctcctttcccctgctctggggtgagtggcctccacctcatcatccctgctgttcctgccttcatcaaacaatcctcaggggtttctgggtgctgactgggggcctccaaagcacagcacagtcaatggggagtggggagagctgggaagagcgggagaggggaattgggagaaggtaggcagggtacacagaaagcaggggactggggacctcaggaccatagccgctgttccttggcccaagccttgtttctaagaatcagtctggctttaggccagtcagccgccaggcaacctctggggatttaaatggatttgcaaattttctagattcttaagatatccttctaaacccccagcagctagaaaagtttgagggctaggaaagttcgagggtgatgggcggccatggcaaccccctagcggtcatgctgctgggtctgggggctgggacctggctgtcagatctgggggctcctctgtgaagaaggggtcagccactgggccatttcctttggtcccaggcagctgctcaggcctcctcgttgtctccctccttctggactctaccccttctccatgccattctaaagcataaatccaatcacaccacctccctgcccaggatccgcctatggctccccagtgcctggagaaagtcccagctcctaacagaggctgccactgcttgacacttactgcacgccgcaactgtgctgagtgctttatgagactgatctcatgtaatgctcaccagcaaccccagaggcagtgactgtttttacctccgttttatacatgaggaaattgaggctcacgcagccacctaactgtagccacacagctagtaagtggcacagcctggagaggttggaatctccccgtgccccattactccaaacttgggccttttgttcccgccagtcagatcccaaaattcccagaaggaatgcgcaccatcctgcttgtgggcatttgccctccctcttccccctttctggaatgcccttcctcatcacttttctttcagggatattccatacaccacctcttccaggcagccttcctaggttcttcctgtcttccaagtgctagccatgcactttgtgctgaagccatgttacttggccctcccctgttggtgatctgtttatgttctgtttgttcatcagagattgttcaggccccagcagtcagaactgaggccgcactttctgctggggaaaggtttaaggtttccccatcctgtgctcttcccccagtgcccagccctggataggcagtgcggctgaaaaaatgtcctggtgaaagggaggaggagctcactgaagaccttctgctcccaagtgtgagactagaacccaggcctccagccttctcacaggtgcccttccaggacatcgtgtggctactccaggcagcattcctccattgcaagcagggaggagtatctctgcttccctctgtgacctcccaattgcacagaggcctctagtgacaagttctgaagtcatgcagtcctcccctgtctccaagcaggagaccctgaatccacagccttcagggacatacagtccctgaacacctacctcatgcaggcatagagcctggtacttcacacaccttggagtcctcatggcaagtttttgaaatcagtgttattacctactttttgtagatgaggaagctgagatctggagaggctaagtgactttcccagggccatacggtgagttaaggtggtgtttaggctgaagtctgcctgactctaaaggcttacctcgtgctccccgggaagctcccagtcagagggaagaatctccatcctcctgcagagcctgctcctggcttcagcaccttccccagcagaaagtgcagcctcaggtctgactgctccaaggtctgcccgggccctggcttggtcttgagagaggaaagagaccatctggtcagcaccctcctcccagacagcagttatcagcagcccccctcctctgcgggaagaagagctgggacttataattgcccacacatgtggggcaggcagtggaaagcaccgtggatccagagtcaggagacccagtgcttgccctggctcgatttaaatccaccgtgtggccaacctcagaccccccacatcccatctctgggctccttccgcagctgggaggcagtgagcgctgtgggtaaccagcaccaggcttgggcatcagatgactatgcattgaccccgagtcagtttctggctgactgtgtgaccccggggcagcaccttgcctctctgggcctcaatctccttctctgtgagcagcaggaccgtgtgtgggctccatgagacaacagcattggcaaggtgcttaccacagttcctgcacttcacagctggacctctggccactggctgagagaaccactgctctcctggcctcctgcattggaacacttggctgtgaaattaatctgcaacctgcaaaaggctctgcccacagaagggacctggacaccatgtatgttccaaagatccgtgtccatcctccaggcacaggccacagtctgactctgagaccagctgccttctaggctaaaggagggtgctctgggcattggctcagaacaggctgctgctgaatgcagtgggaagggagaaagggatgaaaaggtcttctgaaatgcccgcccatttcttgcatttgattcagaacccagtgggcagtgggttcttggaatgggaatctttttggtgccccctgtcttctgacccagagcgttaggagggaagggaaggggtgttgggccccttcccagggtcagggcttgtagcacctcagctgggaagcagtgtgagcatgatgatataacaggaaccaactcgttcttagcactttctgtgtctacttcaattgtgctttacatctgttacctcaaagttgctgctgtattcctcagcacttggaacatgctgggcattcaggacattcttaataaatatttactggattaatttaaccatcgaggctgggcacggtggctcacacatgttatcccagcactttgggaggccgaggcgggtggatcacccgaggtctggagtttgagaccagcctggccaacatggtgaaaccctgtctctactaaaaatacaaaaattagccagacgtggtggtgcgcacctgtatcccagctactcaggaggctgaggcactagaattgcttgaatccaggaggcggagattgcagtgagcctaagcgacagggcaagactgtctcaaaaaaaataaataaataaataaataaaccgtcacagcaacctcaaaattagatatataaactctccccacttttttttttttttttttttgagatggagtctcactctgttgcccaggctggagtgcaatggtatgatcttggctcaccgcaacctccgcttcccaagctcaagtgattctcctgcctcagcctcccaagtagctgggattacaggcgtgtgcgccaccatgcccagctaatttttatatttttagtacagatggggtttcaccgtgttggccaggctggtctcgaactacctgacctcaagtgatccgcctgcctcagactcccaaagtgctgggattacaggcgtgagccaccgcacccagctaaactctccccattttacaggtgagaaagtgcgcagagtcagttgcctaaagtcccacagctcggaagtggcggagctgggatttgcacctgggtgtttctgactccagatccccttgatgagaggctggatggggcctgggatgcccctggggatccagtgtaaaccctgagaatgtgcctcagctgtgggggccctcagcattccagaggtagtcatcagaccctagaaccctatgggactgtgcacagatcgttcccttctggggcctcagttttcccatcagtcaaacgaggaggttgacccagatgatggtaaatctttcttccagccctaaaacaatttcaggattccaagccatgccagcccagattggcagctgcacaagccttgctgtgtactcagggatcatgcatatttaatttcacaatgaaagggtttttttcttaccctttttctacacattacagaaagaggtcaggatcgatgaccactaatggaaaactttaacctgcaataacaatgaggaactttctgacaattagtgtggccccttaacgtgctcagtttcttgaggagctcagagggctcctacagttcccacatgcccattttcctgagatactgagcagggagggtcggggaggaaggcccactaggggctgtgtgtggatgctgtaaccctttaggtctcttccagtgctgcgttttcaaacctcatatgctctaatttcaagaggaagcaaggctttggcccagatgagtgatgggatccagaggtgagggggggaatggacacagggacctacctctggtgggagtgggtgtgaaattcccatgcttgttgcttccagtgtggaagcccacttcacatccctcctgagccctcaggcccagatcctcaggataaagtcttcctgaacctccaagccttagccccagagcccaccctgcccccgccccctacatccaccagatgcttcctggggtagcccacccccagcctggtgcaggaggctgaaaatcaaagtgtactgctttaaccgcattaaaatcccctcctctcctcaattcagatcagggctatttgatgtctcaggtgcctgaaaccttttatctgccagaggtaccagcttctccgccctgtgatggagagggctgtcccttgggagggtcagggggtctgaaagttcctgaatgtcagagatgaaaaggacttttgggggtcacctgatccaactgctttattgtatggatgggaactaaggtccagagaggggaagggttgcacctaaggtccgtacagatcattggtgatgacgctgagcctgggacctgggctcgcctttgttccaccacaggtgctgggtctttaccatctctctgaaggcctggagagacccagctccacctctgtggttcagggctcagcctccaggtctgtctgggctatgggctgaaaaggagcaaagccgtcccaacaagaaatgggaatcttcctgggtggtttgctggacccccgagcttttggccataccacttcttcattctaatcatagtttcctcttataataaagtggggagaagccaagggagaagtttagtggcccccagaggtccatccagctctgcccttagcccctgagagttcctaccatgcttcttgtgactgttttgccacatcctcattgctgctgctctgttaccttcccttctgagaagtggaaacccaagggcagtgacaccaccagcttcttcacttctgaggctgagcctcagtggttatagggtggggcagggtttccagttagccttagaggggtagggctcagctttctaaacatgtcacagaagccctggcccctcctggcccagagcattgaaggtaaaggtgcaggtttgacctggtggactgtgggtggctcccatctcacctgtatttgtgtccttatcagtgtccaacccagggcctatctgctgaatggatagtgaaataatcactagataaataaatgcatgtagagatgcataaatggattggtgggtgggtggatggatggatggatggatggataaatcgatggagacagacagatggcctcccctttagtccagggcacagagatggcttcatgagtactcatcctcctgagggccccatgcttagaagggcctatgtttggtttaatgctctgcagtcatcattttgaaattgttaataatttttaacaaagagccctgcatttccattttgtgcttgccccacaaattatgtagcttgtcctgccagggagttcaggctgagtttgggacggcttcatccccaacactggccttgcagcctccactgtccccatcctaatccacagcctcccactaaatgccagcctgctggtgtcatcctcctgcatggaggccccctccccacagtgcctggagttacagcattgccctgccaagccagcagctactacccgccatcactatcaacaccttgaaaagttggtggtccagagaaaatcctcacacagcaccgcagacctttcctgaagtctccctgcctccttccctggcctcctgctgcctccttcccaggccatcacctacctgtttgctgaagagccccagtttctagcccaacagatctctccctgccatttctcccagatgcctttcatctctcacagagccctggccatacctttccctggcatcatctgccaaaaaactcaagaaaccctggaggcctagctcaaggccacctccctcaggaagccatacccgctctccccactggagtaatcatatactgttgttagttaccatttactgggcacctatgatgtgccaagtgctgtgcgtcatcatctctggccctcccagaaatggaaaaggaggtctcccatgccatttcccaggaaattgggactcagataagttaaactcagagaactggggcttggacccaggaataagtggcttccagctggaaccactgctcccagcctggcggggctcccatccctgccctggatggcatcaggcgcagcctgttggcttcagagtgccatatgtctgttctgccctcaccagctcatctccatcacctccctggaaggaaagagtcaccattgcctatccatgccagttccctagcctagtgaatcctgtgttattaggaggcagccgagggcccaggactgaagagctgaccctacagagccatttaatctctcatatcgtgtaagcgtttactgagcacctactgtaggcctaattccatattaggaagttgaagagagtccagatcgttgttaggtaggtatcctgatttgtgggaagtcatattaaaggactaagacaaaagttcaggaaagaagtaattgacagacagtggtgattagatgggtctggccttaggttggccaccgaatcgccgagtgtgctaggatgagacactcctcactgagcctcaggacactgaaaagggctgttgctactgattgtaccaataatcagcagctacctcttcctgaggagcgtcttttgggagaggccttcttgcaccgtctcatttatcacatgcatcactttgctgagaagcctagtcccgtggagtcttggctgtgcgcgcaaggccgagtgagtgagtgacttcttctcccttgagtgaatgaataataataatgtggccaccaactttgcagagggctgtgtgccaggccctattctaagcattttgcttgtgttaactccttcaatagccctgacaacccagtgatgagccccaatctacagatgagaaaactgaggcacagaggggtggttaagtgaatgaccgaagacaggggtgggaggacagatgctgagacagtgagagggtcagtgaaacatgggggttctctgccctcctgctctgccgcccaggagggctctgaggggaatctcaatgtttggtaattggcactgataagtgaagggtttactcattagctagctacccctcccctatttgcaggccctgggcctgtgggggaaggctgtgtgctggtgggtcagtgtgaatggcccaaggcctgcctgtcccctgcccacttggctctgagaacccattctatttgcggcccccaccccagcccatggctgctccgggctggcagcagcccggggaacagaaggtttgcttgtctgcgcctgccgcacccccctcctcagtctcagcctgggacccctctcaggggctcctttggctgccaagggcctggcactccctgttgccatggcaccggccggagatgaggctctggggggtggggatggggagggcagcagcaggatggtggaggcctggaactctgcagctacagaggccctggccctctgcaaacagtggaagggggtgctggggcccccacaggggcaggcctggaccctgtgcacagcaggcctgtggcagagccggccacacacctgggctgattgcctggatgctgtatcccgcaggagcactgcccctgccagaccctggctttcctaagcaaaaactctctcctcagccttgtgtgctcaccctcagcctctgcagcgaaattgtggagttctatccctagtcctgggttctatccctagctcgactttaaaattattggtgacccggggcaggcctcccgcatacactgcccctcagtcagagcagaggcgggacccagatccctgaggatcttctcatccctgagatcctggattccgtatggacgccattagagggagaacgtttctctgtggacagatggacagaactgtttctggtcaggagacagacagtctggcatgacgggcaagaattcaggttttggcagttgtggtgatgcgcacctgtagtcccagctactcaggaggctgaggcgggaggatcacttgagcccaggagtttgaggctatagtgagctgtgagctatgatcatgccaccacaccactgtactccagcgtgggcaacagagcgagaccctgtctctaaaaaaaagaaagaatataggctttggagtcaggccggcctgagtttgcattcccgttcctttgcatcttacttattgtgtgaccttgggaaagttaccaaaagtctctgagactcatcattctcctctgtaaaatgggaataatgagtgtacccccctcacagggtggtcgtgaggatgaaacaaaatctccagatcatctcatttagcagagtgcctggctctaaattagtagggacttttgtttgtttccagattgggggggatcagaacaataactagaaagatgtcctgtatttggggagagggtggttggtggatagaagcaagaccaataagcagagaatacagtgagataaactgtactcagtgtaattaacaattctcaatagtctgccctctgaagattctaagctggctaagaatgaaatgggccacaggtgaggtggtgagagccctgtcatgggaggtgtgcaattgcagagaaggtgggggagatgtgaatagagggaatgtactaagactgtagggctctgtgaaaaatggagtgactgtttcccactcaaactgtcagcttcagctttacccagctcaaaagacagcgtgaaagagtgaaaggagaagttgggacaaagaaggcgaaaagataaggctgacgactttattttttaatttatttttttgagacggagtttcactcttgttgcccaggctggagtgcagtggcgcgatctcgggttcaagcaattctcctgactcagcctcccgagaagctgggattacaggctccctccaccacgcctggctaattaacttttatttttttttatttgagcttgttctgtgccaggtactgggctgtcctttttgcggggctccttatctttgcctcctgccacagaggggctgtctcatgggcattgggctgtgtgctctggagcctgtctgcccagtgttaaacactggagacaccactggcaagcttttgggcaaacaatgtaaacagtctgtgcctcagtttccacatctgtaaaatgaggaagcagtactgatgtcatgggattgttctgaggacttggtgagatcattcatataaggagcttagcatagatagtgggtgataagtacagcagacccttgaacaatgagggggctggggacagccaccaactgcaaagttgaaaattcatgtatagcttttgactccccaaaaacttaactgctaatagccagcctactgtgggccttactgataatgtaaagtcaattaacacatattttgtctgttatgtatattatatactatgttcttacaataaagtaagctagatgaaagaaaatcacaaggaagagaaaatacattcagtttatattaagtggaagtagatcactgaaaaagtcttcacccttgtctgcacgttaagtagactgggaaggaggaggaagaggaagggttggccttgctttcaggggtggcagaggcggaagaggtggaggagtggaagggtgggaaggaggtggatgtttcacatgtgtggaacattcacgtgttagtggacctgcacagttcaaacctgtgtagttcaagggtcaactgtactaaatcagaggtagctattattattattgttatttttaaggctgttggaggcccagatggggccggggtgggtggggggactcagggccaggaatccacagggccctgggggtaaccctcaaggcaccgcaggaggcaggaagtgcttgctctgcagccggtgggcaggggtgtgcagcaggcctccctccctcactgacctccttctcaggctgcttcccagccttcctggggacccaggccccctcccttgggcccccagcagccgtgaggcacacactgagcgctttcccacgcactgttccaagtagccagccgcatcgctgcccccacccccaagcacacgcactctgacgggtgagggggtgtttgctgcaggagagcggggctcgggctggggagatcagcccgttctttatcagcctggccccattccagacagatgtttcatcttattttggacttccagaaaataggtcatttctttccattgtgttccctggggaggcctcatggggagaggagcatgcagtgagtgacgagtgtgagggcctggcttgggccctggggagctggaggggcagccgccttcctccctcagttgtgagggagctgtcagggccgggccggaagattctgaaaggctgggcagagaagccagcctttgcctgagggggatggagagcagaggagggccggagaggtcacataggtatttcagaaaggtccctctggctggggtgtgagaacaggtggaggggacagattggaggtgaggagattggcggtgggatagccagaggcagccgagcctgtgctggaggagggggtgcagggggcttagcagccttccagggaaccagcgctattcttccatccagtttggacttccagagcagcgggagcacacgccaggccccatcttagtcgatttctgctgctttgttcaggggactttgtaggtacctggagaaacataaagaggaccccgggcctagaagcagcgtggcacagagaatggctccaacaccgagtgggctgcgccgggctgctctctttctgtagcccttagagtgatcccgaggctggtggggaggttcgtggtgcaggggtggagcactgagccttctccaacaactggaagtggagcgagcataggattgaagggggcgggtgggagcctcggccacttccccagtttctcccctccacctgtaactgtctcctcaccctccgatcctgctctcttctctggctcccaggatggggctccctgatcacatgacccaatcacacccacatctcagcctgcttggggacagccacatggaccagacttgccgccagacccaggctgtgctgctatccctttcctactctttagctgctggcgggaggacttcatccctggctccagatgcctcttgcccccacagactcccaggcctggaactggcagccttctctgagctgagtcatgacatgggtccctccccagcacccccaccccgagcccagcattccagctcagcacagctgccttcccagagtggagccctgagggccacagcatgtcagccctgaaagtgctcccaagacactcttgcccacccttttgcacagataaggaaactgaggctcagagagggtcaggactgtacagtagtcacccttagctgcagtttcactttctgaagtttcagttaccccagatcaactgtggtccaaaaacattaaatggaaaattccagaaataaacaacttacaagctttaaattttgtgctgttctgagtagtgtgatgaaatcttgcactgtcctgtctgtcccgcccaggagtgaatcatccctttgtccatatacgctacccacctgttagtcatcaacaaagtccactactgacatccagccatcaacaccatcatggctcggtggtccaggatcacttggagcagatgacctgatccttctgataatgtctggaggtcagtagtagcctaacgctacttcacaattcttacgccatcacctcacttcctcttatcacgtaggcaccgtgtcattccacgtcttcacaagaagagtgaacgatacagtaagatattttaagagagagaacacagtcacatgacttttattacagtatatttttatcattgttctattttattattattgttgttcatctcttactgtgccttatttataaataaaactttataataggtatgtatttgcagggaaaagaacatagtatgtatggggtttggttttatccaaagtttcaggcatctactggggccttggaatgtattccctgcagataggggggaccactatcctataagtgggtgtcacagccgggactagagccaggtcttcttacttcccaccccaacccccctccaaagtctgtcccaggcctgtaaagtgccccggtacggagaacagaagactggactgggtcaggagactggagtctgtggctcacttctcccaacaacttagcaaattacctcctctgagtctcagtcgccaatccctgcctggctgggctcgtgcagagaatgtgactttgaaacaaaggtcaatgtgtggcaggacagaggtgtgctgtggagagggcaggggcagctatagcctgaagcctggggccttgagccaccagcctcacatcttagcaggggctggaggcggggagctgcgcagccaggtgagcttcagccccaccgatcacccgagcccatcttgtctaggccaaaacaatgggccctcttgctttccttccctaagcctcagtttccccacgagcacaatggagcacaggaaggcagttagatcagatagatgatccctgagggctctggcgtgctgacattccaagactctgaccccataaccccatggccaggcctcctcctccctcaggcatttggtttattcagagcatcccaggcctgagactgcctgcccccagcacccccctctccctgcagcatggccctctctctctcatctcactgctgtttctacccggcctgttcctggcctccagactgaacatcccactgtcccctcagtgcccacagaccctccctatcctaaacctgctcagttgcagctctcactcctgctctttgacctcattctcatctcagaaaatggcatcgtcccctcagcacgtgcgcgtgtacacacacacacacatacacttctgcctcccagtattccaagccagatacagaggtgcatacctccctctccagcccctcaatattaagtcacccagtcctgttgattctcagctaagtaactctcaaatccatctgtttttttcagtccccactgccttctccccagacccaaccaaacatgcacgttggtcagagaagcggtggagctggtggcatagaacacagagtcacaccacttcactttaatctctgctctaccccttctggctctgtgttcctagcccagttattaaatgctctctgcctcagtttccccactgtaaaatggaaatgatcactgtatctacctcatagagttgatggagaatcaagtgagccaatacgtgccaaatgctcagaatggttcctggtgcagtaacacgggctttctggcttgtctgttcatgcatatggctgtgtgttcaggtgaatttggggttctatgtgcacatgttctgtgcatgttgtatgtgctgcatacacatgtgaactgttgcacacgggtgcatctccacgggtgctgggcacagtgggagctgcgcacatgtgttttgtgtgggtgtgtacatgtttagtacctgcatgagggcttggcacccacatggcctcttgcatacgtatgtgtttcagaggagtgtgcgaggaagtgcgtaggcaggcatctgtgcatctgtgctgtgtgtatgtgctgaccatgtgcaggctccccccatcaacccccgcagcaatgcagggccccctccctggcctgcctgtgtcgtgggagcctcaggaccctgagggagggaagctgttgctggcggatgtggccaagatgggctggatttatttagattaaggcggtgggaaaggagtggagaattgtacgtgctgggaggagggaagtctggggctctgagaatgactccccaagcatgcttgctctcctggacttggggcacccactcctctcccctggacttggggtccttactctgctcctttgacttggggtccccactctgcttccttttgacttggagttcccagtctgctcccctggacttggggtccttactccgctcccctagacttggggccccccactcctctcccctgaacttggggttccactctgtgccccggacttggggtcctcactctgctcccctaaggggtccctctgagtcacgtgaggagctgggcatgatctccactttgggcctctgagcctacaacctggccagaataggaggaatcaggaggggttcctggcacatagcactctcttcatgggcaaaagggggacacctaggggtgccctccctctctctgctctagaggcctccctgggcaggagagtacagcagatagggggagtgcctgctctctgactgtgacatccagcttgtcctaggtggcccttccctagagtacagtcctcctaaagaggggaagttgtcacaggcaagcccactaccaccaagtcagctgcctgggcctccctgggattggctggaaccagaacagcctctgggaagcacaaagaggcctaacacatttggtggaaaatgtggggtatcagggagtcatccaggatggcctgggaagtcatgtctgggtgccctaagcccttctctgccctccctggccctccagcctcttgtccctaccactctttccttgccacctcctggggttccacgtcaccagcggaaagtcccctgaaacactgttgaaacactgttgtctaacttttttttttttttttgagacagagtctcactctgtcaccaggctggagtgtagtggcgtgatctcagctcactgcaacctccgcctcctgggttcaagcgattctcctgcctcggcctcctgagtagctgggactgcaggcacttgccaccatgtccagctaatttttgtatttttagtagagacggggtttcaccatgttggctaggttggtctcgatctctcaacctcgtgatccgcctggctcggcctcccaaagtgctgggattacaggcatgagccaccatgcccagccttggtctaactcttaattgtatagatggggaaactgaggcccagagagggaaacaacttgtcaaagcccgcacagcaagtctgtggctgaatagtcatggaaattcctttcgtggaatgagatggctggtggattcttatgtgactctagcctcaggaatgtagccccctcctgcttactagcccccacctcctcaaaacaccccggtaagattcgtggtgactagaatcttctctttggcctgtcagaaaggcagagcttcaccatagggacagctctttgagatgacacctgccaacctctctatatggatggggacgcagagttcagagaggctggagactcgctcagtctcacagtgggtcccagggtgcttatgaggggagctgattgctctattcatagtaaagccagtccgagatccctggggtgcctacaccctccctacggcatccacactgcctgcctgtcctctccccacagcttgaatctgcctttttgctgtgtgactggggcatgcttctgtccttctctgggcctctgctgcccattcaaaaagcatacctcctagctcagagtctctaagccacccccagccccaggcccagcagaagagagcctgaaggggagaggatggagtgccacatgggaggagggtcgggggctgcatgccatgaaggcccagcccacatagccagcccagccttccagagccaggccagccccgctgcagtgacctcccttctcctggccagccggccaaattcctcctttagaataataaacagtgtggccagccagggagactgggagaggaggggcagggaagctgaagtgaccccctcccccagcctctgctaatgattttctttggctgagatctctagcaggaagggggcagccagaggggcaccgacggaggggcagatgggcctctgtgggggctgctggctccgccttggcgctgctccctcctgaccaaggaggcctggcatccagctggaggggctggggcagaggaatggtggggagcagaggctggagggggcgtcagaagggctgggctttgagtcaggagcagttcagagaggggagaggaagaaacgaggagaccttcaggcaggcagtctgaaagggaggagggaggagaagagctgatttgctcagactgtttcttggggtgttgggaagagctaagattgggggtccataggcgggaggagccttgcctatgtcccacccctgacatgtgaatgcagccctggtaggtgaggtactcaccatcatccacttccagagctggggacttaggccacagggagagcgatggcacaagaggtggcatgctggggcctgaacccggtctgcagacctaaactgaaaactaaaaggggtgagatggggaggtaggggcaagctgggcatggccttcagaggcaggccaggctgggcagccccacagccagaggaggctccttgttgcctcatcatgccgtcacctcccaaagctcatgctctgcgacccctgtcctctggcgtccttcctgccaatgctgcaggcagactcttggcatacttggctcctggtggtctcttgggacctgaggtgtgtcttccaagatagaggagagcaagggccaccccattcagtctgtctctgtctttgtccttgcttctgtctctgtctttgtccttgcttctgtctctgtctttgtccttgcttctgtctctgtctttgtccttgcttctgtctcttagtgcctctggtgctgtctctctgggcacctcctctctgtctctgtgtctttgtctctttctacttctatcattccaggtctctttctctctgtctccctctcagacaggctctgctgtggaatcttgggtaaacttctcaccttctcagagcctcagtttccccatctgcaccctgggggtgggggtggggggagcctggcttcactggtctccaaggacctgtgaggcctggctgctcgatgggacctctcctgggcccagcccctagccgctgtcccctgggcctccctgtatgctctgggctgagtaaaggtgtccaggcccacctcccacattccacagccccggctccccggcttcccttcccacagcccacagcctcctccatttcctgttgtgcttgtggagctgcgggagttctctgggttctggcctcccccctcctcctcccatccctttcatcacactttcccaaatatttgtcctggcagataagagcctggtattggaactgtcacccggaggacaggctgtcagagctggtaggctactggataccatccagcccaacttcccctccctcactgtacagacagggaaactaaggcacagagagagtctggggacgcagccgaggccacgtgagagtcacaagcagagccaaagcaaaggccaggaccccaaggctaagtccgggatggagaggagacagcctgtggtcatgagtgccctttcaggcttgggacgtggtggcttttgacttcagcccctcggacatgaaggctgggtggcccaagctggggctcattctgcaggagccaggtggtgagatagcccctgtcgctgcctccacctgccctgggccctgactcctgtttaactctgcaggacaccatgcggcttccgggtgcgatgccagctctggccctcaaaggtgggtagatgggagataaggtaggggacccggggggctgcggagtggaaccctggagctggcaggggtgatgtgtgctggtggcagggcgtgaagcaccaggcacactgccctgcccttcagctttagttttcaggatttccagtgggctctgtggaggcctccagctgccagcccttcagctcagaaagcgtcagtgggcccctgcttgtccagaaccatcagctcaaatcctttgattggccctccagaccccatcccaccttctggcccacacccctggcctcctatcctcggtctggtggatctgtggcactcggcttggacccctcattggctgggagcttccaggtccctgctgggcttctcagcacaccccacccctcactcctgcccgttaacatgtcttcagctctgcaggggctgagcgactgacccagcaattaatgaccagccagcagcctgcccggcagctggccataagatggactggctgcctgaccgcccacctcccctcctgatctgtatcaccagggggcatggagggcgtggcctgaaaaatccttctccaggggatgtcgtggagggggaccaatcacttgacacacacacacccccaaccccagttccctccagcccaaaagggcctcagcatcttttctggcccccctctgagctacctaagcccctccctcccatctctctcccacccagagccacctctgggccttgggcagaacctgggcagtcgggggagggggcagagagctgtagggaagaggctcagaaagtgacctgggaagcaatgcaggaactggaggccagggaattgcttcccgaggatttcctggccccttctggtgcctactgcctacacatggcactgctgaaggactcagaggctggggtctaacgggactgacagaggcagtccagaggaatccctggggccttggagctgggcgagcggtcctcagagccatggctggagagccccagtctgtcggataaaggagctgtgctcctcaaggacctgagggctgtgcatacgtggcctcctcgcaggctcagccttgggagaggtgctgaagcccctgtttcctgatgtctgatacctcctctcccaaaggcgagctgctgttgctgtctctcctgttacttctggaaccacagatctctcagggcctggtcgtcacacccccggggccagagcttgtcctcaatgtctccagcaccttcgttctgacctgctcgggttcagctccggtggtgtgggaacggatgtcccaggagcccccacaggaaatggccaaggcccaggatggcaccttctccagcgtgctcacactgaccaacctcactgggctagacacgggagaatacttttgcacccacaatgactcccgtggactggagaccgatgagcggaaacggctctacatctttgtgccaggtaagggctcccagcctgtgtgcccactccttacccctcttgtcaactggaggcatcaggggaagtccagagagtgctttagtttattgtgaaatgcagccatcctagaaaagcagacaatcatggaaccagcctggctcagtcggggagtgtgttcgcccccactccttggtctgggtgatctgcctgctccctgccagtcaccctattcctgcctcccaagaactctatattctcagctgcttccaatctgctccctcttgaccccacatcccttcttccccattctccaagctccagatatcagctgcatttcaacttgtgacttgccttctttcttaccctggcactgtcaatatcaaacattagagctggaagggaccagctctaacatttgatttatgctcttctgggagcatccctattctgtaacggggagacagagggccagagatggcaaatgacttgccacacagcaattcaggggatggccagaaacccagttcccctgatttattcacggctccactcctggcagatcccaccgtgggcttcctccctaatgatgccgaggaactattcatctttctcacggaaataactgagatcaccattccatgccgagtaacagacccacagctggtggtgacactgcacgagaagaaaggggacgttgcactgcctgtcccctatgatcaccaacgtggcttttctggtatctttgaggacagaagctacatctgcaaaaccaccattggggacagggaggtggattctgatgcctactatgtctacagactccagggtgagccccctttctggcctgatgctcagcagaggcaagtataaccctccacagaggaatagccctttacagtttacaaagtgtgggactccacttcccagtggattctcaccacagccttcgaaggaagatagtgttttccccatgttacagaagagggaaactcaggcgcagagagaggatggagcttgtcccctgtcgcagaattcgatagtggcagagctggcctgtgcaacatggtcggtgagggcacaagcttcagagccagctgggtcgaaatcccagctttgctatttcctgtctgagtgactttacacaaagcacataatctctctgagcctgcttcccctcttgtaacgtggggataacaatggctgcctacctcataggatcaattgtgaagattaaataaaagatggagagtacctggcacatgttatgtgctcaatacatttctcctgtacatagatctccagagggtactttgatttccagactgttatcccttctagaacgtcagctccataagaacagagattttgtccactttgttcactactgttgctccagtgtccagaatagtacttggcatgtagtaggtattcagtaaatatttgttgaatgaatgaatcttctacatcagtcatcctttccctctctagccccctaccctatccccaagctgaagtgctagtggctggtggtgacttccccagacctaagccaatctctctctaccagtgtcatccatcaacgtctctgtgaacgcagtgcagactgtggtccgccagggtgagaacatcaccctcatgtgcattgtgatcgggaatgaggtggtcaacttcgagtggacatacccccgcaaagaagtaatgtggggccaggcaggggtcggaggaggggccaggaacgggtggatatctggcttgcaggctgatttctccccggcccctcctgatttggggggcctgcccaacctgttgctgcagagtgggcggctggtggagccggtgactgacttcctcttggatatgccttaccacatccgctccatcctgcacatccccagtgccgagttagaagactcggggacctacacctgcaatgtgacggagagtgtgaatgaccatcaggatgaaaaggccatcaacatcaccgtggttggtgtgtgccttgggctcagcccaatccccaattccttcaacgctccccaccctcacccactttgctgggtgcagagtgatggtgagagttgcatttttgatacagtgatcagggctgagctggacccagtgcctgtcacagccccggggtatagtcagccacactccagtgcagccctagctagcctctgtgccaaccaaaaccccaattccaggataaaccccaaaccaaaatgtagtgtcagccccaaatccaaccctatctcaacctagactttctgactagccagagccccagccccaacctgacttccaagcccaactgccatcccaggtccgggaagccccatccccaaattcaaccttatcactagtcccagcatcagccacagtactgacccagaacagagaactgttagtacaactctgttcccaacctgggagctggccccagcatccatattagccccaaattcggccccttctccaggccctgtccccagcccaatttcaacctcagctccggaaactccatggctggcacggtccccaggcctgaagccccaccccacaggctggcctcctttgggattcagttggtgccctgcccccagggccccgcccctgacggtcaccccttgcagagagcggctacgtgcggctcctgggagaggtgggcacactacaatttgctgagctgcatcggagccggacactgcaggtagtgttcgaggcctacccaccgcccactgtcctgtggttcaaagacaaccgcaccctgggcgactccagcgctggcgaaatcgccctgtccacgcgcaacgtgtcggagacccggtgagcagctcgctctcccatcccattcttgaagttatttttctttgcagccgccaggcagccctcggctttcagccacaaacctaggcccagctttctgagagcatattaggtgccaggtgctggggatgctgcagcgaccagagctgacagttcatccctcctagagtttctagtctagtggaggaaacagtcgccggtcagatgatcacccagatgtttagttgtccttgtgatgggtggggccagcagtagcagccaagaagtaaacgggcagatgactggggaagagggtgccaggcaggccactcatggcctgtggtatccctgaggctggagatttgctggctgacagagactgtggtaggttaggatggagcagtgtccacctttctgaaggggagagaaataggactttccttcaatgctccccacccccacccacagttcatctcaaccctccctcttggcctaggggaactgcctgtgggtgaggatttacgagacctggtttgagtcccggctctgctaccaatgccgagatgaccttggcaagcccttcccctccctgggccttgttcctctttataccaggagggtggggagaactgtaagagtccttccgactctgacagctgcctttcctgctccccaggtatgtgtcagagctgacactggttcgcgtgaaggtggcagaggctggccactacaccatgcgggccttccatgaggatgctgaggtccagctctccttccagctacagatcaatggtgatgagcacgcccctcgccatgtccctgctccttcccctccctgcccccgttccctctcccttcctgcactgtccacccacccatgggaggagtgggagagggagcctggaactcaggagatggattctaggccactgacccactgccgtgtgaacctggcctctgggcctcagtttccccagctgtataaggaggccatctggctagattggtgtttccaaaacttcaggcacttaggtaccaaggccatgattttcccttctcacattccacttatactgtactattaactcgataggtatttattgagcaactaccatatgcctgtctcttcaaggttcttgaacttccctccctgcctttgtgcagcttgcatccaagtaggggaagacaaacactaacagtagggaggaaaaccccagcaaattacataggttagaaggtaactaacactgcgggagaggaaaaacaggggccgggtagggaaggttgagagtgctgggcacagagtgatggtgtgagttgcatttttgatacagtgatcagggctgaggaagtgacatttgcatgaagacctgaagaaggtgaggacattagcttagtggatatttggggaaagggtacctcgggcagtgcaaaggccagagcaatcactgaaaggcttgtgtggttggaacagggctgttggggagagtggtgggagatgaagtcagaacggggatagggcagtgggggctgggagaagggcaaatcgcataggtctttgtgggcctggtgcagactttggcttttactatgaccgaaatgaagagccatggcagggttttgagcagagaaatgacatgataatgacttaatgttttgttaattgactttctaaaaacaaatttattttgaaagacaaaatgtaacctctctattgtaggtggaaaatcggcatcacatgtcataaatataaagcaaccactaaaataaactcagagaagaccaaacaatgctattaaatgctggcttcatgagcttggtggcccagggttctgagcttgaggcctagcctccctttgttaaaagggaagattagcaagtctcagagaggtgttaaagacagactagcaccctgctgaggcgttccctttgaagtacccagaagggaacccatcggttttcacactgattcctggtatttaatgttcacctgcagtctacagccctcctcccccaagagagtctctgggccaggtcctcccctgaggacctgtcctgttaactgtcctgaccctcccgcctcctaactcagtgctctctccatgcagtccctgtccgagtgctggagctaagtgagagccaccctgacagtggggaacagacagtccgctgtcgtggccggggcatgccccagccgaacatcatctggtctgcctgcagagacctcaaaaggtgagcagacctgggcctcagtctcccagtgtccccagctggctagaaaaagctcgtgaaggttatctagtcccgcccgttcttcttggcatattgttccgggcatagagttgcatcctaggaggccaggtcaccacctccttggtcctactctgtatgacctaaatggtcccttttccttacctttacccctgggcagtttggcctagcaaagtgcagggtctgagccccagagacctcacccgccctgtagatcagttctgcactcctggccaggtcgattctaatgcagtggacagaggcaggattcagtgcaggttctgcctctaccccatacgccgtgtgaccccgtgggtcaaataagaatggattttgcaatccacgttgtcagttctgggatgggagcaccccctgctgaccagtagagggagcacaggaggagcccgctcggaaacaggcagtgggacataggaactggacacgtcctgcctccttccaccagtttctcctcagtttccctgtctgcaaggggaaggggctggcagccaaccctaccggctctcctggcaggtgtccacgtgagctgccgcccacgctgctggggaacagttccgaagaggagagccagctggagactaacgtgacgtactgggaggaggagcaggagtttgaggtggtgagcacactgcgtctgcagcacgtggatcggccactgtcggtgcgctgcacgctgcgcaacgctgtgggccaggacacgcaggaggtcatcgtggtgccacactgtgagtccccagcctcagtggcccctgacgatcccaatccctaccttaaccctgcctaattggtaatgtgcccatgtacccacagcaggccaaaggagttagcatgcccaggggcaaacaggagcattgtgaaaccctgttgtgtacatgcataggaacacattctggcaaacacaatatgggtacacacgtgtacaaacacaagtctataagccatggatatgaatatccttcagtgtggtgtacatatactatatgtatgtcgtaagccatgtacatgagcatgcctgttccttgaacataggtgcaaatcctctgtgtgtagatatgtaaatcgtctactgaagaatgcccaatctccagtcactcctgtaaagctagagtgtatgtgtataagcatacacctgtgcactatgcctgtccatgtatgtaaacccaccacgtgtttgtaagccatgtacatgagcatgcctaattcccagacatctgtttaaaccccacagtgtatgtctgtatgcatgtaccggtgggtacacaattcctgtacatgtgtacaagcaatgcatgtacaattcctttgcatgcatgcaaactggcatagtgcatgtctgtaagcatataattggagcacacctttctagaaaagtgtacaagcataattcccgtacacatgtgcctgctgtacaatgtacatctgttagcaggtacacatacacgtgtaatttctgtgcgtatgaacaatgcctaccagtgtcttgatgcttttgtgtatctagctgcccgtccttatgcatacatgcacctgtatgagtgtgcttcatttattcacctttcttcttcattcgataaatatgaggacccaacttctcattgaagtataaaggtcaaagggctcagccctgcctggacctcctagtacccatagtccagagagagaaggcagacaaggaacttggcaattccctccgggatcaccacattaggggcaaagcctggagggagaaggggtcccatgcccagctatgggattcaggaaagtattctagaaaaggaacctttaggtgaaaacctgaaaaatgactagaagttagcctggtaaggaatggtgtcccactcagagggaatggcctgtgtaaaagcccagaggcaaaatgagttcctagaaatgaaaagagttcaactcaatctggctggaggatcgagtgtgtggatacttaggggctggaagggtggcagataaaggggaaggaagtgctatgggatggagctacaggggtcggcagatctagagcaggcagggctccaaaggccatgtgaggcatcttggtctctgtgtatgcaggtccctgggcatgttcaggcacgtgcctgtctagagctgcctcctgtcccctgccctgtggtggatgggtgggcttctttcatcccctcatttcacccatgctcccacacatgcatacacattctctgagcaagtgggtatctgggcagacagtgtggacagcctgagtggaagaccagctctgagccaaggcagatgtgacacttttgtgtgactaaagcctgagcgggaagctgagcaccagcacacagggcctaggatggctgcaagagggctccttcatgcctccagcgatggctgcctagaagatgcaggcttccttcccaggaccgagatgtgtgatgagcgggaggagggaggagaagagggatgttggtctgggaccctgaggaggaaggcatggcgaggataggtaagggtaagggagaatggataaggggtgagagacgaagttggagagggaagcagaggtagagtcatgaagcctctgccttatgtgccattttaggagtttggcctttttcctttactgataacatggggaagcatccaaagttttttttttttttttttttttttttaagatggagtctggctctgttgcccaggctggagtgcagtggtgtgatctcggctcactgcaagctctgcctcccgggttcaaacaattctcctgcctcagcctcccaaatagctgggatgacagcagtccaccaccacgcccagctattttttgtatttttagtagaaatgggatttcaccatattggccaggccggtcttgaactcctgacctcgtgatccgcccaccttggcctcccaaagtgctgggattacaggcatgagccactgcacccagcctccatccaaagattttaagcataacaatggcattcacttagtaattcaacaaatagtaccagctacctaccatgtgccaggtgtggttttagggactgaggttatagcaatggatggggaggaggaggtgggacaggactccctagggagcaaagaagcatagattggggacagaagaggagggaatgagttccataggacctcatgggtggccagcagggcagggcaggggagaggcaggtctggcggggctggatgaggagagtgggaagctgtacagcgaagaggctgaggccttgagggtggaggagactcgaggcttgtaagggccagtgtgagccccactttgttaactaccgtcaccactccaaccccaactgggccctttgggtgaagtggggagaagtggcctccgtgctgaggtctggattcatcaggctgggggtctcagccattgctccctcagtggccactcactcagtccaccggccactcggtcaggcatggagcttggagtctgaccgagctgtggcagccccagcaagggtgtggactcagaggagaggtaagccacaacccagccctcaggggctccagggctaatgggaggtccaggcaatggacaggaactcagaacaggatttgcaccccgtccagagctctggcagcaaggccagactgactggcagggctgaagggacgtggaggccagcagtgatctgagtgggggtagttactgaggggatggagtatttacaggacagtctgaacgtgtggcctagagcgagatgctgagggtctgacactgcaggctgatggggaggtgggcgcttctattctggacaggatgtgtacggagggatctatgatgccaaagatggggtgaggggagggtagctgcccagtttgctcatggcctgctctcatctctgcctccagccttgccctttaaggtggtggtgatctcagccatcctggccctggtggtgctcaccatcatctcccttatcatcctcatcatgctttggcagaaggtaagcccctccctggcccagtgggtgaagactggcacatcattattttgcataaattccacccctctgccctccttgaatgctgcgtgatctggccacatgcagggctcagcatggaactcaggtggggacttgtgacgctggctgtctcagcttcctccacccccagcagtctgggccaacctgagcctggcccgagctatccaggattcccttcccctactgtgtcattaagtccccgggtcctgctgagacaccattcctctcatcctagccatggagcatgggacctttgaggtggactgcatgggctccaggattcttccaggtctcacccatggagaacctgtgattctactgaaatgcattctgatcctattagtctgtaatttcagtgttctgctttgagattttaccattctgtgattccaacattttaagcttcctgaatcaggattacagcacctcatgatcccatctttctaaaattccagtcctgtggttccaacaccttaagatgtcaacattctaagcttacatctttctgacttgcccagcactggggagggccatccgcatccagccgagtaccctacctggtgtcactttctggggtcacctgctctactacttccatctgaggagcagcgaaggctgggagagaagctagagaggaggttctcatgagccaggccctcagctgccagttgctcctcagtctgccaagtcctgaagcctcctctggggccccttggtccctgttccctccgagcccacgaagaccttggctcagttgagcacttgctgtgtgacttcaaatatgcccctgcccctctctgggcctcagggtctcctgccccatgtgtcctagacggacgaacctaatggggctcagggcctgagactccctctgataactaattcctggggttggtcctccagaagccacgttacgagatccgatggaaggtgattgagtctgtgagctctgacggccatgagtacatctacgtggaccccatgcagctgccctatgactccacgtgggagctgccgcgggaccagcttgtgctgggtcagtcctgagaggcctcatgtggcagtgtggggactcaagttgggtgggaagactctctgaggtctggtcccagccttgccatgactagctatgagacctagggctggtgtcttgccttctctggccctccatctcctactatgtacaatgagagcaagaccatcccccaggaactgcctagcattgaggttctatgatcctgtgaccctgtgagacgggatccctatgtggcaaaagtggaaggattgaggacaggctgagtagcaggcctggtctggctggggaagctgaggaggtacagagaagcgtgctcccttgggagggaagaaactttccagagattaaagatggggcagaaagcaggcaggacttagatgagataccaggaaagacagggaggtattgtggttgcaggagtgtgtttagggaatatcctgagtccaaggtggtttaagtaatgtctaggttgacctaagagagtggctctttcccctcactgggcaggaagggtgatagcggccgggggtaggggagtggggggaggggggcagctgggggagcggtgcagcttcctggtaggccaggagctaatggatcatctctgcaccaggacgcaccctcggctctggggcctttgggcaggtggtggaggccacggctcatggcctgagccattctcaggccacgatgaaagtggccgtcaagatgcttaaatgtgagtagtccttggagccctccacatctgggccttcacctctccctgcccctccccacacacttagcctctcccagggtggcctgatgctgatttgcaggcactagaggggccatcacactgcagcaggcgctgctcccgagtctgggtctggtttgggaaagagcgttcctctccctggcctcctcggcctgcttccccctaccctggcctcttcccctcctcagagtgtgggtgctcacccccgccaggctgcctgggtcttgcagcacagggcggggcagaagagtcagaataggctcctgtggtggggcctccatggagcctccatgactgggcctggcctggggcccccattttcctcagccacagcccgcagcagtgagaagcaagcccttatgtcggagctgaagatcatgagtcaccttgggccccacctgaacgtggtcaacctgttgggggcctgcaccaaaggaggtaccgagcccactgccccagaggcctcagggaaagtgcccaccaccaaggccaggccccgcctacccccccctcaggccttgcacaacagcacactcctgctggagggtccgtgcccacccgctccagcgccctcactgcgcggtcccagagggcggtggggtttagaaactcacaaaatcacaacaccttcaaggctgaaggattagtcaggtcaccagtcccagcagcttccagaccatggtgttggctgacacttttttattttcccaatacattttgaaaaccaataaataacagctcacatgacattaagatgagttatatgcccaccattggagaccaccagcttgctacttgggagctaccttcatttgatcatagaagaaagtctctgtggccaactgggtctatttgaagctctgattgccagttaggctgaaaaaaaatgttatcaccatttgcagctgcttattgtgagatttgggattttcctcagcattatgcaaccaaaataaaatacagaagtatgttgggtacatagacttattcacgtttgcaatgatcgctcatttcaacattttcgtttgtgtagatatcttcaagttctcactgattgactttaagtaaatgcattgtagttgaatttaactactaaagtgatcgttgtaaacagtggcctttatctgctttctatactgggctccaaagtaagctttagtttgaaaacatatcaataagagccaacactgcgagctcgccacgtgcccagccaataaagacatcatctcattaatcctcatgacagtgctttgtggtgggtttaattagccccacttaacagctggggaaggtaaggctcagggagactaagtaccttgctctccaccacagaggcaggaaaagaatccagatttgcaaggcactaaagcctcctagccgtcatgccaaagtgtctctcccacatccagcccctgattagcctcatggccttgaagggacgcctgaggcctccatagggactgtccctgagcctgtccctctgcaggacccatctatatcatcactgagtactgccgctacggagacctggtggactacctgcaccgcaacaaacacaccttcctgcagcaccactccgacaagcgccgcccgcccagcgcggagctctacagcaatgctctgcccgttgggctccccctgcccaggtaccaggagggaggccagggactgaatctttgggatacctgaggagcaccgctccttcccctccttttgtccaggaggggaagctgaggctgtgacagggcaggggacagaatcactcctggagctagggctgttccacaagatggtccaccccagatgagggaataacactaatgccaggccctgtgctgctaagccctctacagatgtgacatgccatccctgtgtcgtgggtgtttgcccttcagtccagggcaggcagtgatggaggaaggggcagaggctgtggtgagatgagagccaagcctcccaatttgcacagtggtgctccaggctgtgttcctctctgcagcctctacacatcagcctccacactgcctctcagggagctcaactccagtctttgtcttttccaaaaagaacacttcttagttctgttgctgattacaaaaacaaagacaagagtagcttcagaaaagcgtaaaagaccttaaaacccactcatgtcctctccaatgttttgacattcagtctcccaggagccaaagggcttctcccatctttttcctgcctatagagacagatgtgtgtagagccccacagctctttggggagctgatgctacaggcataggtagcggggtgaatcctggctgcctatgctgggttgcagtcaggcactcccatggccaggtggcgctggggaggccacaggaaggcgcctctgaacacacccgtcttgtgacctttgccctggggtgctgtaatcgcctctgggtgtgagctctctgggttctaactgtcattttggtagcctcagtgcccagcttggcccagcaggttggttgaaaagtcttgatccacaggctttcctactgggatagactgaaggaagatgagtgagtgtgtgagtgagagaagaaattcatgagtggcaaggggcaggaggggaggggaaggcaaagcctgcaggctctcctgtgatgctcctttacccccagccatgtgtccttgaccggggagagcgacggtggctacatggacatgagcaaggacgagtcggtggactatgtgcccatgctggacatgaaaggagacgtcaaatatgcagacatcgagtcctccaactacatggccccttacgataactacgttccctctggtgggtggacatagtgacatagtaccccacatccaaacaggctgatgctcttcacatgcccagccttgccaaaaaccctgagaagaagggagcctcgtgcccatttcatagatgtagaaattgaggctagccacctggccaaaactgatctgtagtggacccctaaacggaagccctgtttatggatccggaaacatgcgtagaaccctcagggagggagagagcagggatatgggaggacctggccttttgtcgtggtagggaaagtgatctactcagcttcagccccaggctggtctagtgtccctgagaggcaggcaggcaggccaggctgggcaaaagtggcccaagggctaatgccaaaaggccaatgagggcactgataaagcaggagaactttgagtttgatattaagaaatcattctccttttaggggagacctagacgatcagtagccacctgtcttggacattcagtctcccaggagccaaagggcaggggtcctgtgggccagaaggagatataagatagcaggtgaccctctgcttctcctctagcccctgagaggacctgccgagcaactttgatcaacgagtctccagtgctaagctacatggacctcgtgggcttcagctaccaggtggccaatggcatggagtttctggcctccaagaacgtacgtgtggtgttggtggggcagagtgggggctgtggggaggtgggtcacccagccagccagcatcctccaagagcacaccagggtggcctctcgcacatgggcagtgttgtattttcccaaagcccttgacatgaagggtctttccccacaattgtccccaaggcctcagctcccctctccccaaacccagtgcgtccacagagacctggcggctaggaacgtgctcatctgtgaaggcaagctggtcaagatctgtgactttggcctggctcgagacatcatgcgggactcgaattacatctccaaaggcagcgtgagtaccttccctggcccctgcagggcagtcacagtgcctgtgaccgcaggaacagattccctcctgaccagtgtggctgcagctcataggaaatctgtgtggggctccttgtggcctgccctgacagcagtgatgggctgtgcctgcccagctatgtgtgcagggacaggatggggagccgcccaggagtgcatggagcaagtatagcggcggggagggctggctataatgggtccagggtgggggaagggggaacaggccgaatgtgttgttccagtggtggtgggcagaggaagaagcccaggtgacagggcaagaaagatgagcaggtcacatgcagtagcagggattggtctggttaaaacgtgatcatcctgcctgtctctcatctccccacttttccgcaaaccccagatggagggacgctaggcccagagatcaaaggcagccaggataagagcttggggggtgccttgacaagtccctggctcccacacttcactactcagaccctggggcttttccccagggacaggggctgccttgtccccagctagtgagaaaggaaacagcctctggtcctctgaccagccctgggatggacatgggaactgtgctgcgcagagaccagggccctcacagggaatgggacggagaagtggttgtgggtgggagctgccagataccctcctcccatcccaggtgcagagtggggctgaggtccttccttgcactcagcacctgtcctgacctccctacagacctttttgcctttaaagtggatggctccggagagcatcttcaacagcctctacaccaccctgagcgacgtgtggtccttcgggatcctgctctgggagatcttcaccttgggtatgcttgcttcctcctccagccctcagcatcctggcctggtgtctacctcgaccactcatgcctctggcctggtggggctatgggacgagccctgatacagggatcctggttcaggtcccagctctgctaccttctccctgctgtgtgatgttagcaaattctttgccctctctgggtctctttatctccctgtctgagcattgacaggtttgaacagtgacatcagaaagcctgcttggctctcacattctggctgtctatcctggggagggttgtggtctctgttcagagcccatgaaggagcccacagttccaaatgccaggggcactgcccccttacccataccagggccagcatggctctccttgtcctgtagaagagggtgccctgccacttttccacccctgagcctgtgtatctcttgtctctgctccccaacaggtggcaccccttacccagagctgcccatgaacgagcagttctacaatgccatcaaacggggttaccgcatggcccagcctgcccatgcctccgacgagatgtgagtggagtctcatgcatttgggaggattttgtgctgcaaacaatagatatccaactctactggcttaaaccaaagatgagagatttgttagctcagagatctagaaagccttggtgtaactggatccagccattcaaaggatggcatcaggaacctcttgttctagccctgagctctgctttgctctgtgtggcctcattttcaggccagcattgcccaaatggctaccagcagtgccagtctcatgtcctactgcttgctccatagtgccagcaaaagtcccagagctgaccttcaagggctcaggtggggtcacatgccatcaagaaccaaccgtggaagctgcagggctgaaaactgttggcgaaggttggctcctgtgctcacccaggcgtagtcaacctgtggaaccatgtggaatgggggctctgcgagggcctcccaagggaatatccagagacaggacctctggatacacccagccaccacttccctccagctcctttccatggctcaccttgttctgagaggcagcagcctcctgctcccccagccctgccttgtcccctgaaccctgggccagaggccctgacccttctccctatccccagctatgagatcatgcagaagtgctgggaagagaagtttgagattcggccccccttctcccagctggtgctgcttctcgagagactgttgggcgaaggttacaaaaaggtatgttgaggcagggtaggggtggagcacggagagctctggtgcagaagtcagacaccgagtacaaggctctgcgtgatgggctggcatttaggggaccaccctttgtcctctctgggcctcagtttccctgctggttctaggaggggatgggctggcgctgtgagtttattttagcagcagagagctttatgaaatggaatcctacatggaagctgatcgattagatgcagggagggggcctagagcactgtctgtcctgctgcctccctcaggcctttacctccataccgaaccgtggggctccttcagaagtgtgaataaccccaggttacatgaccatgaaccgcctgaccacttggatcctgtcacaggattgtccaaggcccaaagagccagtagggccctgaaaccctgccccgtccaacaacacgggtccaagtgaggaggaaatacacatggcctttgacacagaggcagctccttctttgggtccatttctcacccccactgccccccggggatggtcccagggacctgggagatggagtaaggtcatcaccacttcacagcaaaggaaactgaggccctgaagaaggacgctgaggcagcatgagagcctgtgcctgtctgctctgaagtgggggaagagttagagtcctgggtgctggtctgataactgcccctccctgggtggtcctgagctcaccatgccttgtaagattctatgtgaggtaggagggcagctcaaccatgtggcttgggcaaatccctttcccctctgagcagcgggggtcttatttatacaaagggggatgggctcggttagaagatccctgaaggcatttctggcctgaccatccctgtttctttggttctccctgccccgggagcagaagtaccagcaggtggatgaggagtttctgaggagtgaccacccagccatccttcggtcccaggcccgcttgcctgggttccatggcctccgatctcccctggacaccagctccgtcctctatactgccgtgcagcccaatgagggtgacaacgactatatcatccccctgcctgaccccaaacccgaggttgctgacgagggcccactggagggttcccccagcctagccaggtaaccaccctggcctggggccaaggaaattgtgcacagtgtgtgtgtgtgtgtgtgtgtgtgtgtgtgtgtgtgcgcgcgcgcgcgcgcgctgccaggtttgcctcagaggtaagttacgtagggtaagtacttatccctaccaatgaatagaagacagaatggaactcatttgaactttgatgccctgaggtggaaagggcaggctagtaaaaacaaaagtatgggctgggacttacttgcaaggtagctatttcctttaagggagcccccagaggttatctatactctcttatctctaggtcctgtcctagccccaaaaagaagaagcaaacctacttagcatccccagcaccccagctgttactcatggccagcctgaggcctatgttctgttcttcagcaccacgccctggggccagagggagcctgcttggttgtaggagtcagaggtgcctaaaggaattcaggacagaattcagactgggaaggagattcgtggttttcttttgccttgggaagtggtgaagttacagcccagagggggctttataggaggaccctgctgttgtgtggacttgatgtccacgcaggatctccccttaactggagagaagggctccccatgaggccacgcccacctccaaagcgagatccagcccaaggtgaagtggctggagccccaggctggggtactgtcccaactctgccactagccgctgagacctgggaaggcttctcctctgcgagcctcagtttctccatatgtgccaggagtgcacaccggccttagaaggctccgaaggccctcattgctctaactgttgaagaggccaaccatccaagagtcccagtggatggtgcagaggagtgaagtgcagcgctcacacagcttgaggtgtgaatgctcaccctgttttgtgccctcagacaagctgcttcactgtctaaacattggtgtcctcttctttttttttttattatttttattcatttatttatttatttttgagatggagtttcgctcttgttgcccaggctggagtgcaatggcgcgatctcggctcactgcaacctccacctcccaggttcaagcaattctcctgcctcagcctcccgagtagctggaattacaggcatgcagcaccacgcctggctaattttgtatttttagtagagatggggtttctccatgttgagactggtctcaacctcctgacctcaggtgatccgcctgcctcggcctcccaaagtgctgggattacagatgtgagccaccacgcccggccagtgtcttcttctgtaaaatacaaacagtaaaagtacttctattaggcggtcattgcaaggattaaatgagatagcatacacctttaggagtgcagaggagggagatgctggtgggtgagaaatgagctttggagccagctgaccctgctccgaagttccagctcctgcacttccctgctgtgtgaagtggggcagtgatataacctctctgagccacactttcctcacggtgcaggccttgcatagttttcacaagagttaaatgagccggagtgtgtgaagcctacggtgcaggggtggacacaccgaaggctcttcatgactgctgctggaatcctcctgggctccttcctagcccctcactcactgcctctttcctctagctccaccctgaatgaagtcaacacctcctcaaccatctcctgtgacagccccctggagccccaggacgaaccagagccagagccccagcttgagctccaggtggagccggagccagagctggaacagttgccggattcggggtgccctgcgcctcgggcggaagcagaggatagcttcctgtagggggctggcccctaccctgccctgcctgaagctccccccctgccagcacccagcatctcctggcctggcctgaccgggcttcctgtcagccaggctgcccttatcagctgtccccttctggaagctttctgctcctgacgtgttgtgccccaaaccctggggctggcttaggaggcaagaaaactgcaggggccgtgaccagccctctgcctccagggaggccaactgactctgagccagggttcccccagggaactcagttttcccatatgtaagatgggaaagttaggcttgatgacccagaatctaggattctctccctggctgacaggtggggagaccgaatccctccctgggaagattcttggagttactgaggtggtaaattaacttttttctgttcagccagctacccctcaaggaatcatagctctctcctcgcacttttatccacccaggagctagggaagagaccctagcctccctggctgctggctgagctagggcctagccttgagcagtgttgcctcatccagaagaaagccagtctcctccctatgatgccagtccctgcgttccctggcccgagctggtctggggccattaggcagcctaattaatgctggaggctgagccaagtacaggacacccccagcctgcagcccttgcccagggcacttggagcacacgcagccatagcaagtgcctgtgtccctgtccttcaggcccatcagtcctggggctttttctttatcaccctcagtcttaatccatccaccagagtctagaaggccagacgggccccgcatctgtgatgagaatgtaaatgtgccagtgtggagtggccacgtgtgtgtgccagtatatggccctggctctgcattggacctgctatgaggctttggaggaatccctcaccctctctgggcctcagtttccccttcaaaaaatgaataagtcggacttattaactctgagtgccttgccagcactaacattctagagtattccaggtggttgcacatttgtccagatgaagcaaggccatataccctaaacttccatcctgggggtcagctgggctcctgggagattccagatcacacatcacactctggggactcaggaaccatgccccttccccaggcccccagcaagtctcaagaacacagctgcacaggccttgacttagagtgacagccggtgtcctggaaagcccccagcagctgccccagggacatgggaagaccacgggacctctttcactacccacgatgacctccgggggtatcctgggcaaaagggacaaagagggcaaatgagatcacctcctgcagcccaccactccagcacctgtgccgaggtctgcgtcgaagacagaatggacagtgaggacagttatgtcttgtaaaagacaagaagcttcagatgggtaccccaagaaggatgtgagaggtgggcgctttggaggtttgcccctcacccaccagctgccccatccctgaggcagcgctccatgggggtatggttttgtcactgcccagacctagcagtgacatctcattgtccccagcccagtgggcattggaggtgccaggggagtcagggttgtagccaagacgcccccgcacggggagggttgggaagggggtgcaggaagctcaacccctctgggcaccaaccctgcattgcaggttggcaccttacttccctgggatccccagagttggtccaaggagggagagtgggttctcaatacggtaccaaagatataatcacctaggtttacaaatatttttaggactcacgttaactcacatttatacagcagaaatgctattttgtatgctgttaagtttttctatctgtgtacttttttttaagggaaagattttaatattaaacctggtgcttctcactcac

SEQ ID NO: 71 - DNA, 5084 bp, Homo sapiens
aggctgccagcagccagcagtgactgcccgccctatctgggacccaggatcgctctgtgagcaacttggagccagagaggagatcaacaaggaggaggagagagccggcccctcagccctgctgcccagcagcagcctgtgctcgccctgcccaacgcagacagccagacccagggcggcccctctggcggctctgctcctcccgaaggatgcttggggagtgaggcgaagctgggccgctcctctcccctacagcagcccccttcctccatccctctgttctcctgagccttcaggagcctgcaccagtcctgcctgtccttctactcagctgttacccactctgggaccagcagtctttctgataactgggagagggcagtaaggaggacttcctggagggggtgactgtccagagcctggaactgtgcccacaccagaagccatcagcagcaaggacaccatgcggcttccgggtgcgatgccagctctggccctcaaaggcgagctgctgttgctgtctctcctgttacttctggaaccacagatctctcagggcctggtcgtcacacccccggggccagagcttgtcctcaatgtctccagcaccttcgttctgacctgctcgggttcagctccggtggtgtgggaacggatgtcccaggagcccccacaggaaatggccaaggcccaggatggcaccttctccagcgtgctcacactgaccaacctcactgggctagacacgggagaatacttttgcacccacaatgactcccgtggactggagaccgatgagcggaaacggctctacatctttgtgccagatcccaccgtgggcttcctccctaatgatgccgaggaactattcatctttctcacggaaataactgagatcaccattccatgccgagtaacagacccacagctggtggtgacactgcacgagaagaaaggggacgttgcactgcctgtcccctatgatcaccaacgtggcttttctggtatctttgaggacagaagctacatctgcaaaaccaccattggggacagggaggtggattctgatgcctactatgtctacagactccaggtgtcatccatcaacgtctctgtgaacgcagtgcagactgtggtccgccagggtgagaacatcaccctcatgtgcattgtgatcgggaatgaggtggtcaacttcgagtggacatacccccgcaaagaagtaattgggcggctggtggagccggtgactgacttcctcttggatatgccttaccacatccgctccatcctgcacatccccagtgccgagttagaagactcggggacctacacctgcaatgtgacggagagtgtgaatgaccatcaggatgaaaaggccatcaacatcaccgtggttgagagcggctacgtgcggctcctgggagaggtgggcacactacaatttgctgagctgcatcggagccggacactgcaggtagtgttcgaggcctacccaccgcccactgtcctgtggttcaaagacaaccgcaccctgggcgactccagcgctggcgaaatcgccctgtccacgcgcaacgtgtcggagacccggtatgtgtcagagctgacactggttcgcgtgaaggtggcagaggctggccactacaccatgcgggccttccatgaggatgctgaggtccagctctccttccagctacagatcaatgtccctgtccgagtgctggagctaagtgagagccaccctgacagtggggaacagacagtccgctgtcgtggccggggcatgccccagccgaacatcatctggtctgcctgcagagacctcaaaaggtgtccacgtgagctgccgcccacgctgctggggaacagttccgaagaggagagccagctggagactaacgtgacgtactgggaggaggagcaggagtttgaggtggtgagcacactgcgtctgcagcacgtggatcggccactgtcggtgcgctgcacgctgcgcaacgctgtgggccaggacacgcaggaggtcatcgtggtgccacactccttgccctttaaggtggtggtgatctcagccatcctggccctggtggtgctcaccatcatctcccttatcatcctcatcatgctttggcagaagaagccacgttacgagatccgatggaaggtgattgagtctgtgagctctgacggccatgagtacatctacgtggaccccatgcagctgccctatgactccacgtgggagctgccgcgggaccagcttgtgctgggacgcaccctcggctctggggcctttgggcaggtggtggaggccacggctcatggcctgagccattctcaggccacgatgaaagtggccgtcaagatgcttaaatccacagcccgcagcagtgagaagcaagcccttatgtcggagctgaagatcatgagtcaccttgggccccacctgaacgtggtcaacctgttgggggcctgcaccaaaggaggacccatctatatcatcactgagtactgccgctacggagacctggtggactacctgcaccgcaacaaacacaccttcctgcagcaccactccgacaagcgccgcccgcccagcgcggagctctacagcaatgctctgcccgttgggctccccctgcccagccatgtgtccttgaccggggagagcgacggtggctacatggacatgagcaaggacgagtcggtggactatgtgcccatgctggacatgaaaggagacgtcaaatatgcagacatcgagtcctccaactacatggccccttacgataactacgttccctctgcccctgagaggacctgccgagcaactttgatcaacgagtctccagtgctaagctacatggacctcgtgggcttcagctaccaggtggccaatggcatggagtttctggcctccaagaactgcgtccacagagacctggcggctaggaacgtgctcatctgtgaaggcaagctggtcaagatctgtgactttggcctggctcgagacatcatgcgggactcgaattacatctccaaaggcagcacctttttgcctttaaagtggatggctccggagagcatcttcaacagcctctacaccaccctgagcgacgtgtggtccttcgggatcctgctctgggagatcttcaccttgggtggcaccccttacccagagctgcccatgaacgagcagttctacaatgccatcaaacggggttaccgcatggcccagcctgcccatgcctccgacgagatctatgagatcatgcagaagtgctgggaagagaagtttgagattcggccccccttctcccagctggtgctgcttctcgagagactgttgggcgaaggttacaaaaagaagtaccagcaggtggatgaggagtttctgaggagtgaccacccagccatccttcggtcccaggcccgcttgcctgggttccatggcctccgatctcccctggacaccagctccgtcctctatactgccgtgcagcccaatgagggtgacaacgactatatcatccccctgcctgaccccaaacccgaggttgctgacgagggcccactggagggttcccccagcctagccagctccaccctgaatgaagtcaacacctcctcaaccatctcctgtgacagccccctggagccccaggacgaaccagagccagagccccagcttgagctccaggtggagccggagccagagctggaacagttgccggattcggggtgccctgcgcctcgggcggaagcagaggatagcttcctgtagggggctggcccctaccctgccctgcctgaagctccccccctgccagcacccagcatctcctggcctggcctgaccgggcttcctgtcagccaggctgcccttatcagctgtccccttctggaagctttctgctcctgacgtgttgtgccccaaaccctggggctggcttaggaggcaagaaaactgcaggggccgtgaccagccctctgcctccagggaggccaactgactctgagccagggttcccccagggaactcagttttcccatatgtaagatgggaaagttaggcttgatgacccagaatctaggattctctccctggctgacaggtggggagaccgaatccctccctgggaagattcttggagttactgaggtggtaaattaacttttttctgttcagccagctacccctcaaggaatcatagctctctcctcgcacttttatccacccaggagctagggaagagaccctagcctccctggctgctggctgagctagggcctagccttgagcagtgttgcctcatccagaagaaagccagtctcctccctatgatgccagtccctgcgttccctggcccgagctggtctggggccattaggcagcctaattaatgctggaggctgagccaagtacaggacacccccagcctgcagcccttgcccagggcacttggagcacacgcagccatagcaagtgcctgtgtccctgtccttcaggcccatcagtcctggggctttttctttatcaccctcagtcttaatccatccaccagagtctagaaggccagacgggccccgcatctgtgatgagaatgtaaatgtgccagtgtggagtggccacgtgtgtgtgccagtatatggccctggctctgcattggacctgctatgaggctttggaggaatccctcaccctctctgggcctcagtttccccttcaaaaaatgaataagtcggacttattaactctgagtgccttgccagcactaacattctagagtattccaggtggttgcacatttgtccagatgaagcaaggccatataccctaaacttccatcctgggggtcagctgggctcctgggagattccagagttggtccaaggagggagagtgggttctcaatacggtaccaaagatataatcacctaggtttacaaatatttttaggactcacgttaactcacatttatacagcagaaatgctattttgtatgctgttaagtttttctatctgtgtacttttttttaagggaaagattttaatattaaacctggtgcttctcactca

SEQ ID NO: 72 - protein, 1101 aa, Homo sapiens
MRLPGAMPALKGELLLLSLLLLLEPQISQGLVVTPPGPELVLNVSSTFVLTCSGSAPVVWERMSQEPPQEMAKAQDGTFSSVLTLTNLTGLDTGEYFCTHNDSRGLETDERKRLYIFVPDPTVGFLPNDAEELFIFLTEITEITIPCRVTDPQLVVTLHEKKGDVPVPYDHQRGFSGIFEDRSYICKTTIGDREVDSDAYYVYRLQVSSINVSVNAVQTVVRQGENITLMCIVIGNEVVNFEWTYPRKEVIGRLVEPVTDFLLDMPYHIRSILHIPSAELEDSGTYTCNVTESVNDHQDEKAINITVVESGYVRLLGEVGTLQFAELHRSRTLQVVFEAYPPPTVLWFKDNRTLGDSSAGEIALSTRNVSETRYVSELTLVRVKVAEAGHYTMRAFHEDAEVQLSFQLQINVPVRVLELSESHPDSGEQTVRCRGRGMPQPNIIWSACRDLKRCPRELPPTLLGNSSEEESQLETNVTYWEEEQEFEVVSTLRLQHVDRPLSVRCTLRNAVGQDTQEVIVVPHSLPFKVVVISAILALVVLTIISLIILIMLWQKKPRYEIRWKVIESVSSDGHEYIYVDPMQLPYDSTWELPRDQLVLGRTLGSGAFGQVVEATAHGLSHSQATMKVAVKMLKSTARSSEKQALMSELKIMSHLGPHLNVVNLLGACTKGGPIYIITEYCRYGDLVDYLHRNKHTFLQHHSDKRRPPSAEKNALPVGLPLPSHVSLTGESDGGYMDMSKDESVDYVPMLDMKGDVKYADIESSNYMAPYDNYVPSAPERTCRATLINESPVLSYMDLVGFSYQVANGMEFLASKNCVHRDLAARNVLICEGKLVKICDFGLARDIMRDSNYISKGSTFLPLKWMAPESIFNSLYTTLSDVWSFGILLWEIFTLGGTPYPELPMNEQFYNAIKRGYRMAQPAHASDEIYEIMQKCWEEKFEIRPPFSQLVLLLERLLGEGYKKKYQQVDEEFLRSDHPAILRSQARLPGFHGLRSPLDTSSVLYTAVQPNEGDNDYIIPLPDPKPEVADEGPLEGSPSLASSTLNEVNTSSTISCDSPLEPQDEPEPEPQLELQVEPEPELEQLPDSGCPAPRAEAEDSFL

SEQ ID NO: 73 - DNA, 1579 bp, Homo sapiens
ggcaccccttacccagagctgcccatgaacgagcagttctacaatgccatcaaacggggttaccgcatggcccagcctgcccatgcctccgacgagatctccaccctgaatgaagtcaacacctcctcaaccatctcctgtgacagccccctggagccccaggacgaaccagagccagagccccagcttgagctccaggtggagccggagccagagctggaacagttgccggattcggggtgccctgcgcctcgggcggaagcagaggatagcttcctgtagggggctggcccctaccctgccctgcctgaagctccccccctgccagcacccagcatctcctggcctggcctgaccgggcttcctgtcagccaggctgcccttatcagctgtccccttctggaagctttctgctcctgacgtgttgtgccccaaaccctggggctggcttaggaggcaagaaaactgcaggggccgtgaccagccctctgcctccagggaggccaactgactctgagccagggttcccccagggaactcagttttcccatatgtaagatgggaaagttaggcttgatgacccagaatctaggattctctccctggctgacaggtggggagaccgaatccctccctgggaagattcttggagttactgaggtggtaaattaacttttttctgttcagccagctacccctcaaggaatcatagctctctcctcgcacttttatccacccaggagctagggaagagaccctagcctccctggctgctggctgagctagggcctagccttgagcagtgttgcctcatccagaagaaagccagtctcctccctatgatgccagtccctgcgttccctggcccgagctggtctggggccattaggcagcctaattaatgctggaggctgagccaagtacaggacacccccagcctgcagcccttgcccagggcacttggagcacacgcagccatagcaagtgcctgtgtccctgtccttcaggcccatcagtcctggggctttttctttatcaccctcagtcttaatccatccaccagagtctagaaggccagacgggccccgcatctgtgatgagaatgtaaatgtgccagtgtggagtggccacgtgtgtgtgccagtatatggccctggctctgcattggacctgctatgaggctttggaggaatccctcaccctctctgggcctcagtttccccttcaaaaaatgaataagtcggacttattaactctgagtgccttgccagcactaacattctagagtattccaggtggttgcacatttgtccagatgaagcaaggccatataccctaaacttccatcctgggggtcagctgggctcctgggagattccagagttggtccaaggagggagagtgggttctcaatacggtaccaaagatataatcacctaggtttacaaatatttttaggactcacgttaactcacatttatacagcagaaatgctattttgtatgctgttaagtttttctatctgtgtacttttttttaagggaaagattttaatattaaacctggtgcttctcactca

SEQ ID NO: 74 - protein, 85 aa, Homo sapiens
MNEQFYNAIKRGYRMAQPAHASDEISTLNEVNTSSTISCDSPLEPQDEPEPEPQLELQVEPEPELEQLPDSGCPAPRAEAEDSFL

SEQ ID NO: 75 - DNA, 5707 bp, Homo sapiens
aggctgccagcagccagcagtgactgcccgccctatctgggacccaggatcgctctgtgagcaacttggagccagagaggagatcaacaaggaggaggagagagccggcccctcagccctgctgcccagcagcagcctgtgctcgccctgcccaacgcagacagccagacccagggcggcccctctggcggctctgctcctcccgaaggatgcttggggagtgaggcgaagctgggccgctcctctcccctacagcagcccccttcctccatccctctgttctcctgagccttcaggagcctgcaccagtcctgcctgtccttctactcagctgttacccactctgggaccagcagtctttctgataactgggagagggcagtaaggaggacttcctggagggggtgactgtccagagcctggaactgtgcccacaccagaagccatcagcagcaaggacaccatgcggcttccgggtgcgatgccagctctggccctcaaaggcgagctgctgttgctgtctctcctgttacttctggaaccacagatctctcagggcctggtcgtcacacccccggggccagagcttgtcctcaatgtctccagcaccttcgttctgacctgctcgggttcagctccggtggtgtgggaacggatgtcccaggagcccccacaggaaatggccaaggcccaggatggcaccttctccagcgtgctcacactgaccaacctcactgggctagacacgggagaatacttttgcacccacaatgactcccgtggactggagaccgatgagcggaaacggctctacatctttgtgccagatcccaccgtgggcttcctccctaatgatgccgaggaactattcatctttctcacggaaataactgagatcaccattccatgccgagtaacagacccacagctggtggtgacactgcacgagaagaaaggggacgttgcactgcctgtcccctatgatcaccaacgtggcttttctggtatctttgaggacagaagctacatctgcaaaaccaccattggggacagggaggtggattctgatgcctactatgtctacagactccaggtgtcatccatcaacgtctctgtgaacgcagtgcagactgtggtccgccagggtgagaacatcaccctcatgtgcattgtgatcgggaatgaggtggtcaacttcgagtggacatacccccgcaaagaaagtgggcggctggtggagccggtgactgacttcctcttggatatgccttaccacatccgctccatcctgcacatccccagtgccgagttagaagactcggggacctacacctgcaatgtgacggagagtgtgaatgaccatcaggatgaaaaggccatcaacatcaccgtggttgagagcggctacgtgcggctcctgggagaggtgggcacactacaatttgctgagctgcatcggagccggacactgcaggtagtgttcgaggcctacccaccgcccactgtcctgtggttcaaagacaaccgcaccctgggcgactccagcgctggcgaaatcgccctgtccacgcgcaacgtgtcggagacccggtatgtgtcagagctgacactggttcgcgtgaaggtggcagaggctggccactacaccatgcgggccttccatgaggatgctgaggtccagctctccttccagctacagatcaatgtccctgtccgagtgctggagctaagtgagagccaccctgacagtggggaacagacagtccgctgtcgtggccggggcatgccccagccgaacatcatctggtctgcctgcagagacctcaaaaggtgtccacgtgagctgccgcccacgctgctggggaacagttccgaagaggagagccagctggagactaacgtgacgtactgggaggaggagcaggagtttgaggtggtgagcacactgcgtctgcagcacgtggatcggccactgtcggtgcgctgcacgctgcgcaacgctgtgggccaggacacgcaggaggtcatcgtggtgccacactccttgccctttaaggtggtggtgatctcagccatcctggccctggtggtgctcaccatcatctcccttatcatcctcatcatgctttggcagaagaagccacgttacgagatccgatggaaggtgattgagtctgtgagctctgacggccatgagtacatctacgtggaccccatgcagctgccctatgactccacgtgggagctgccgcgggaccagcttgtgctgggacgcaccctcggctctggggcctttgggcaggtggtggaggccacggctcatggcctgagccattctcaggccacgatgaaagtggccgtcaagatgcttaaatccacagcccgcagcagtgagaagcaagcccttatgtcggagctgaagatcatgagtcaccttgggccccacctgaacgtggtcaacctgttgggggcctgcaccaaaggaggacccatctatatcatcactgagtactgccgctacggagacctggtggactacctgcaccgcaacaaacacaccttcctgcagcaccactccgacaagcgccgcccgcccagcgcggagctctacagcaatgctctgcccgttgggctccccctgcccagccatgtgtccttgaccggggagagcgacggtggctacatggacatgagcaaggacgagtcggtggactatgtgcccatgctggacatgaaaggagacgtcaaatatgcagacatcgagtcctccaactacatggccccttacgataactacgttccctctgcccctgagaggacctgccgagcaactttgatcaacgagtctccagtgctaagctacatggacctcgtgggcttcagctaccaggtggccaatggcatggagtttctggcctccaagaactgcgtccacagagacctggcggctaggaacgtgctcatctgtgaaggcaagctggtcaagatctgtgactttggcctggctcgagacatcatgcgggactcgaattacatctccaaaggcagcacctttttgcctttaaagtggatggctccggagagcatcttcaacagcctctacaccaccctgagcgacgtgtggtccttcgggatcctgctctgggagatcttcaccttgggtggcaccccttacccagagctgcccatgaacgagcagttctacaatgccatcaaacggggttaccgcatggcccagcctgcccatgcctccgacgagatctatgagatcatgcagaagtgctgggaagagaagtttgagattcggccccccttctcccagctggtgctgcttctcgagagactgttgggcgaaggttacaaaaagaagtaccagcaggtggatgaggagtttctgaggagtgaccacccagccatccttcggtcccaggcccgcttgcctgggttccatggcctccgatctcccctggacaccagctccgtcctctatactgccgtgcagcccaatgagggtgacaacgactatatcatccccctgcctgaccccaaacccgaggttgctgacgagggcccactggagggttcccccagcctagccagctccaccctgaatgaagtcaacacctcctcaaccatctcctgtgacagccccctggagccccaggacgaaccagagccagagccccagcttgagctccaggtggagccggagccagagctggaacagttgccggattcggggtgccctgcgcctcgggcggaagcagaggatagcttcctgtagggggctggcccctaccctgccctgcctgaagctccccccctgccagcacccagcatctcctggcctggcctgaccgggcttcctgtcagccaggctgcccttatcagctgtccccttctggaagctttctgctcctgacgtgttgtgccccaaaccctggggctggcttaggaggcaagaaaactgcaggggccgtgaccagccctctgcctccagggaggccaactgactctgagccagggttcccccagggaactcagttttcccatatgtaagatgggaaagttaggcttgatgacccagaatctaggattctctccctggctgacaggtggggagaccgaatccctccctgggaagattcttggagttactgaggtggtaaattaacttttttctgttcagccagctacccctcaaggaatcatagctctctcctcgcacttttatccacccaggagctagggaagagaccctagcctccctggctgctggctgagctagggcctagccttgagcagtgttgcctcatccagaagaaagccagtctcctccctatgatgccagtccctgcgttccctggcccgagctggtctggggccattaggcagcctaattaatgctggaggctgagccaagtacaggacacccccagcctgcagcccttgcccagggcacttggagcacacgcagccatagcaagtgcctgtgtccctgtccttcaggcccatcagtcctggggctttttctttatcaccctcagtcttaatccatccaccagagtctagaaggccagacgggccccgcatctgtgatgagaatgtaaatgtgccagtgtggagtggccacgtgtgtgtgccagtatatggccctggctctgcattggacctgctatgaggctttggaggaatccctcaccctctctgggcctcagtttccccttcaaaaaatgaataagtcggacttattaactctgagtgccttgccagcactaacattctagagtattccaggtggttgcacatttgtccagatgaagcaaggccatataccctaaacttccatcctgggggtcagctgggctcctgggagattccagatcacacatcacactctggggactcaggaaccatgccccttccccaggcccccagcaagtctcaagaacacagctgcacaggccttgacttagagtgacagccggtgtcctggaaagcccccagcagctgccccagggacatgggaagaccacgggacctctttcactacccacgatgacctccgggggtatcctgggcaaaagggacaaagagggcaaatgagatcacctcctgcagcccaccactccagcacctgtgccgaggtctgcgtcgaagacagaatggacagtgaggacagttatgtcttgtaaaagacaagaagcttcagatgggtaccccaagaaggatgtgagaggtgggcgctttggaggtttgcccctcacccaccagctgccccatccctgaggcagcgctccatgggggtatggttttgtcactgcccagacctagcagtgacatctcattgtccccagcccagtgggcattggaggtgccaggggagtcagggttgtagccaagacgcccccgcacggggagggttgggaagggggtgcaggaagctcaacccctctgggcaccaaccctgcattgcaggttggcaccttacttccctgggatccccagagttggtccaaggagggagagtgggttctcaatacggtaccaaagatataatcacctaggtttacaaatatttttaggactcacgttaactcacatttatacagcagaaatgctattttgtatgctgttaagtttttctatctgtgtacttttttttaagggaaagattttaatattaaacctggtgcttctcactcac

SEQ ID NO: 76 - protein, 1100 aa, Homo sapiens
MRLPGAMPALKGELLLLSLLLLLEPQISQGLVVTPPGPELVLNVSSTFVLTCSGSAPVVWERMSQEPPQEMAKAQDGTFSSVLTLTNLTGLDTGEYFCTHNDSRGLETDERKRLYIFVPDPTVGFLPNDAEELFIFLTEITEITIPCRVTDPQLVVTLHEKKGDVPVPYDHQRGFSGIFEDRSYICKTTIGDREVDSDAYYVYRLQVSSINVSVNAVQTVVRQGENITLMCIVIGNEVVNFEWTYPRKESGRLVEPVTDFLLDMPYHIRSILHIPSAELEDSGTYTCNVTESVNDHQDEKAINITVVESGYVRLLGEVGTLQFAELHRSRTLQVVFEAYPPPTVLWFKDNRTLGDSSAGEIALSTRNVSETRYVSELTLVRVKVAEAGHYTMRAFHEDAEVQLSFQLQINVPVRVLELSESHPDSGEQTVRCRGRGMPQPNIIWSACRDLKRCPRELPPTLLGNSSEEESQLETNVTYWEEEQEFEVVSTLRLQHVDRPLSVRCTLRNAVGQDTQEVIVVPHSLPFKVVVISAILALVVLTIISLIILIMLWQKKPRYEIRWKVIESVSSDGHEYIYVDPMQLPYDSTWELPRDQLVLGRTLGSGAFGQVVEATAHGLSHSQATMKVAVKMLKSTARSSEKQALMSELKIMSHLGPHLNVVNLLGACTKGGPIYIITEYCRYGDLVDYLHRNKHTFLQHHSDKRRPPSAEKNALPVGLPLPSHVSLTGESDGGYMDMSKDESVDYVPMLDMKGDVKYADIESSNYMAPYDNYVPSAPERTCRATLINESPVLSYMDLVGFSYQVANGMEFLASKNCVHRDLAARNVLICEGKLVKICDFGLARDIMRDSNYISKGSTFLPLKWMAPESIFNSLYTTLSDVWSFGILLWEIFTLGGTPYPELPMNEQFYNAIKRGYRMAQPAHASDEIYEIMQKCWEEKFEIRPPFSQLVLLLERLLGEGYKKKYQQVDEEFLRSDHPAILRSQARLPGFHGLRSPLDTSSVLYTAVQPNEGDNDYIIPLPDPKPEVADEGPLEGSPSLASSTLNEVNTSSTISCDSPLEPQDEPEPEPQLELQVEPEPELEQLPDSGCPAPRAEAEDSFL

(The sequence listing continues in the following parts.)
